(19) United States
(12) Patent Application Publication
(10) Pub. No.: US 2025/0277200 A1
(43) Pub. Date: Sep. 4, 2025

(54) ENGINEERED CPN1 CONSTRUCTS AND VARIANTS

(71) Applicant: Vertex Pharmaceuticals Incorporated, Boston, MA (US)

(72) Inventors: Aaron AGUHOB, South San Francisco, CA (US); Natacha LE MOAN, San Francisco, CA (US); Grant E. BLOUSE, Burlingame, CA (US); Arzu SANDIKCI, Berkeley, CA (US); Ryan PAVLOVICZ, Seattle, WA (US); Amanda LOSHBAUGH, Seattle, WA (US); Yifan SONG, Seattle, WA (US); Timothy MYLES, South San Francisco, CA (US)

(21) Appl. No.: 18/274,430

(22) PCT Filed: Jan. 27, 2022
(86) PCT No.: PCT/US2022/014162

§ 371 Date: Sep. 10, 2024

Related U.S. Application Data
(60) Provisional application No. 63/142,462, filed on Jan. 27, 2021.
(60) Provisional application No. 63/222,929, filed on Jul. 16, 2021.

(51) Int. Cl. C12N 9/48; A61K 38/00

(52) U.S. Cl. CPC C12N 9/485; C12Y 304/17003; A61K 38/00; C07K 2319/31; C07K 2319/50

(57) ABSTRACT

Provided herein are carboxypeptidase N catalytic subunit (CPN1) variants, comprising at least one modification with respect to a wild type carboxypeptidase N1 of the M14 family, wherein the variants have at least one improved characteristic as compared to the wild type CPN1. Also provided herein are fusion constructs comprising CPN1, or variants thereof. Also provided herein are methods of making and using such variants and constructs. The variant and constructs provided herein may be useful for treating diseases or conditions associated with dysregulation of the complement system.

### CROSS REFERENCE TO RELATED APPLICATIONS

[0001] This application claims priority to U.S. Provisional Application No. 63/142,462 filed on Jan. 27, 2021, and U.S. Provisional Application No. 63/222,929 filed on Jul. 16, 2021, the contents of which are incorporated herein by reference in their entireties.

### REFERENCE TO SEQUENCE LISTING

[0002] An electronic version of the Sequence Listing is filed herewith, the contents of which are incorporated by reference in their entirety. The electronic file was created on Jan. 27, 2022, is 3.29 megabytes in size, and is titled CTBI_005_02WO_SeqList_ST25.txt.

### BACKGROUND

[0003] The complement system includes the classical, alternative, and lectin pathways, and is tightly controlled by a number of regulators. One such regulator is carboxypeptidase N (CPN), a plasma enzyme of the metalloprotease class and M14B subfamily. CPN cleaves basic amino acids from the C-terminal end of bioactive peptides and proteins, leading to their inactivation. CPN has a role in preventing the buildup of peptides that are involved in signaling and regulation of inflammation, or controlling blood pressure, thus regulation of the levels of these peptides is necessary. CPN is synthesized in the liver and secreted into the bloodstream in a constitutively active form, while another similar carboxypeptidase, carboxypeptidase B2 (CPB2), circulates in plasma as a zymogen, and requires activation by the thrombin-thrombomodulin complex or plasmin. Normally, CPN circulates in the blood as a hetero-tetramer consisting of two 83 kDa (CPN2) domains, each flanked by a 48 to 55 kDa catalytic (CPN1) domain.

[0004] While CPN targets a number of substrates, CPN plays a significant role in complement regulation by targeting C3a and C5a, which are generated during complement activation. C3a stimulates macrophages and is implicated in B cell antibody response. Due to the expression of C3a receptor (C3aR) at the surface of endothelial cells and platelets, C3a can also be involved in platelet function and thrombus formation. C5a is a chemotactic factor for leukocytes and activates neutrophils, basophils and mast cells and therefore can be involved in expansion of T helper type 1 (Th1) cells and suppression of regulatory T cells (Treg). CPN inactivates C3a and C5a by cleaving one or more amino acids from their C-terminal ends. Like CPN, CPB2 also has several physiological substrates, including C3a and C5a. Continuous regulation of C3a and C5a levels is necessary to maintain a pro- and anti-inflammatory balance in the complement system. For example, a genetic deficiency in CPN or CPB2 can result in the exacerbation of pathological symptoms of complement disorders such as hemolytic-uremic syndrome (HUS) and cobra venom factor (CVF) challenge. Provided herein are compositions and methods to address the dysfunction and/or dysregulation in the complement system.

### SUMMARY

[0005] In one aspect provided herein are variants of a carboxypeptidase N catalytic subunit (CPN1) comprising at least one modification with respect to a wild type CPN1, wherein the variant has at least one improved characteristic as compared to the wild type CPN1.

[0006] In another aspect, provided herein are fusion constructs comprising a carboxypeptidase N catalytic subunit (CPN1) or variant thereof. Exemplary fusion constructs are provided in Table 2 and Table 5.

[0007] In another aspect provided herein is a method of treating a disease or condition in a subject in need thereof, comprising administering to the subject any one of the CPN1 variants or fusion constructs of the disclosure.

### BRIEF DESCRIPTION OF THE DRAWINGS

[0008] FIG. 1A depicts a schematic diagram of a CPN tetramer made up of two heterodimers, and FIG. 1B depicts a single heterodimer of the tetramer.

[0009] FIG. 2 depicts a schematic diagram of CPB2 (TAFI), showing both the zymogen and activated forms.

[0010] FIG. 3 depicts schematic diagrams of a wild type CPN with its catalytic subunit (CPN1) alone, with its catalytic subunit (CPN1) plus its regulatory subunit (CPN2), and various exemplary fusion constructs comprising other components.

[0011] FIG. 4A depicts schematic diagrams of exemplary fusion constructs of the disclosure comprising various activation peptides to alter the sensitivity of the constructs to certain complement components.

[0012] FIGS. 4B-4C depict the structure of a CPN1-CPB2 fusion, showing the CPB2 activation peptide (TAFI activation peptide) masking the catalytic site of CPN1, and a schematic diagram of the fusion, respectively.

[0013] FIGS. 4D-4E depict the structure of a CPN1-CPA4 fusion, and a surface representation of the same, respectively.

[0014] FIGS. 4F-4G depict the structure of a CPN1-CPA1 fusion, and a surface representation of the same, respectively.

[0015] FIG. 5 depicts a general schematic diagram of a screening process for activation peptides (SEQ ID NOs: 45-63), and examples of libraries for the activation peptide screening.

[0016] FIGS. 6A-6C depict Coomassie staining from SDS-PAGE analysis showing various fusion constructs (chimeras) expressed in Expi293 cells. FIG. 6D shows Coomassie staining from SDS-PAGE analysis of CPN1-containing fusion construct expression, using a similar process as depicted in FIGS. 6A-6C, with five constructs. FIGS. 6E-6H show exemplary CPN1-containing fusion constructs and their corresponding SDS-PAGE expression analysis. FIGS. 61-6J shows exemplary CPN1-HSA fusion constructs with and without TEV protease cleavage sites (SEQ ID NOs: 64-66), and FIG. 6K shows their corresponding SDS-PAGE expression analysis. FIG. 6L shows SDS-PAGE analysis of an exemplary CPN1-HSA fusion construct in the presence or absence of TEV protease. FIG. 6M shows the results of a peptide-based TAFI activity assay for exemplary CPN1-HSA constructs in the presence or absence of TEV protease. FIGS. 6N-6O shows SDS-PAGE expression analysis of exemplary CPN1-containing constructs. FIGS. 6P-6W shows SDS-PAGE expression analysis of exemplary CPN1-containing constructs.

[0017] FIGS. 7A-7C depict various chromatography and SDS-PAGE results from a two-step purification of exemplary fusion constructs. FIGS. 7D-7F show SDS-PAGE and SEC chromatograms for exemplary CPN1 variants purified by affinity purification.

[0018] FIGS. 8A-8B depict examples of data obtained from a cell-based screening assay used to evaluate construct activity on C3a and C5a by measuring the level of activation of C3aR and C5aR by C3a and C5a. FIGS. 8C-8D show activities of exemplary fusion constructs in the Dansyl-Ala-Arg Activity assay. FIGS. 8E-8F show activities of exemplary fusion constructs in the Hippuryl-Arg Activity assay.

[0019] FIGS. 9A-9B show results of CPN1-HSA efficacy after intravenous administration in an in vivo rodent model of complement activation. FIG. 9A shows Pulmonary Congestion Index (PenH) % change from baseline. FIG. 9B shows leukocyte infiltration in lung 24 hours after CPN1-HSA treatment.

[0020] FIGS. 10A-10F show cytokine and chemokine effects after intravenous administration of CPN1-HSA in an in vivo rodent model of complement activation.

[0021] FIGS. 11A-11C depict in vivo pharmacokinetics profiles of CPN1-HSA intravenously administered to rats. FIG. 11A depicts PK parameter estimates for three animals assessed. FIG. 11B depicts the PK profiles of three animals analyzed, and the representative PK profile is depicted in FIG. 11C.

[0022] FIG. 12 depicts the regimen for determining the pharmacokinetics profile of CPN1-HSA intravenously or subcutaneously administered to cynomolgus macaques. Table 1 (of FIG. 12, not to be confused with the Table 1 of the Detailed Description) summarizes the dose levels of the test articles and vehicles. Table 2 (of FIG. 12, not to be confused with the Table 1 of the Detailed Description) summarizes the blood collection schedule.

[0023] FIGS. 13A-13D depict the results of serum stability assays for CPN1-HSA. FIGS. 13A & 13B depict Western blots for two exemplary CPN1-HSA constructs. FIGS. 13C and 13D depict half-life curves for exemplary CPN1-HSA constructs in serum.

[0024] FIGS. 14A-14D depict the results of CPN1-HSA stability in plasma isolated from rats following intravenous or subcutaneous administration of CPN1-HSA. FIGS. 14A &14B depict two different rats' plasma samples. FIG. 14C depicts CPN1-HSA stability following subcutaneous injection. FIG. 14D depicts CPN1-HSA stability following intravenous injection of human plasma purified CPN1.

[0025] FIG. 15 depicts the specific activity of exemplary fusion constructs as determined through a TAFI assay.

### BRIEF DESCRIPTION OF THE TABLES

[0026] The following Tables are provided as a part of the application.
[0027] Table 1 depicts the amino acid sequences of exemplary components comprising the constructs of the disclosure.
[0028] Table 2 depicts exemplary fusion constructs with components in the N and C termini of the core molecule specified.
[0029] Table 3A depicts exemplary modification strings of core molecule hCPN1 (1-398) (SEQ ID NO: 7). Amino acid substitutions, deletions, insertions, etc. are noted in conventional format.
[0030] Table 3B depicts exemplary modification strings of core molecule hCPN1 (1-320) (SEQ ID NO: 8). Amino acid substitutions, deletions, insertions, etc. are noted in conventional format.
[0031] Table 3C depicts exemplary modification strings of core molecule hCPN1 (1-438) (SEQ ID NO: 6). Amino acid substitutions, deletions, insertions, etc. are noted in conventional format.
[0032] Table 4A depicts exemplary modifications of individual residues of core molecule hCPN1 (1-398) (SEQ ID NO: 7). Amino acid substitutions, deletions, insertions, etc. are noted in conventional format.
[0033] Table 4B depicts exemplary modifications of individual residues of core molecule hCPN1 (1-320) (SEQ ID NO: 8). Amino acid substitutions, deletions, insertions, etc. are noted in conventional format.
[0034] Table 4C depicts exemplary modifications of individual residues of core molecule hCPN1 (1-438) (SEQ ID NO: 6). Amino acid substitutions, deletions, insertions, etc. are noted in conventional format.
[0035] Table 5 depicts the signal sequences and SEQ IDs of exemplary fusion constructs of the disclosure. The signal sequences are optional, and useful for the expression the fusion constructs.

### DETAILED DESCRIPTION

[0036] The disclosure provides compositions and methods useful for modulating the signaling and regulation of the complement system. Specifically, complement system modulation can be observed by providing variants of carboxypeptidase N catalytic subunit (CPN1), and fusion constructs comprising CPN1, and variants thereof. Provided herein are CPN1 variants, and CPN-1 containing fusion constructs, that are more active, and/or more stable in circulation than wild type CPN. Such modulation can include an increase in cleavage and inactivation of C3a and/or C5a, thus reducing complement-mediated inflammation, and reducing the amplification of the complement pathways. For example, some carboxypeptidase variants can alter levels of regulators within the complement system, which includes C3a or C5a. In some embodiments, the variants and fusion constructs provided herein can act on the classical pathway of the complement system, or on the alternative pathway of the complement system, or on the lectin pathway of the complement system, or on one or more pathways. The disclosure also provides methods of making and using these variants and fusion constructs, for example in treating a disease or condition associated with complement dysregulation, e.g. treating an overactive complement response.

### Carboxypeptidase N Variants

[0037] FIG. 1A depicts a schematic diagram of a CPN tetramer made up of two heterodimers. FIG. 1B depicts a single heterodimer of the tetramer. CPN endogenously exists as a tetramer, having two identical catalytic subunits called CPN1 (“CPN catalytic domain” in FIGS. 1A-1B), and two identical regulatory subunits called CPN2 (“regulatory subunit CPN2” in FIGS. 1A-1B) which act to stabilize the CPN1 subunits. Each heterodimer includes a CPN1 domain and a CPN2 domains. CPN1 is also referred to as a CPN catalytic domain herein.

[0038] In some embodiments, provided herein are CPN variants, such variants comprise one or more modifications with respect to a wild type CPN, and are referred to herein as “CPN variants.” As used herein, a “modification” to a wild type CPN includes: a deletion of one or more amino acid residues, a deletion of one or more CPN domains, a substitution of one or more amino acid residues in one or more domains, a substitution of one or more CPN domains, an insertion of one or more amino acid residues in one or more domains, an insertion of one or more CPN domains, a swapping of one or more CPN domains, an insertion of one or more domains from a protein or any other component that is not CPN, and a fusion to a protein or component that is not CPN. For example, such components (collectively referred to herein as a “non-CPN domain”) can be, but are not limited to, other members of the carboxypeptidase family such as CPB2, or a half-life extender. Such CPN variants fused to one or more non-CPN domains, such as domains from other members of the carboxypeptidase family, may be referred to herein as “CPN chimeras” or “CPN fusion proteins” or “CPN fusion constructs.”

[0039] In some embodiments, provided herein are variants of the CPN catalytic domain (also referred to herein as CPN1), such variants comprise one or more modifications with respect to a wild type CPN1, and are referred to herein as “CPN1 variants.” As used herein, a “modification” to a wild type CPN1 includes one or more of: a deletion of one or more amino acid residues, a substitution of one or more amino acid residues, and an insertion of one or more amino acid residues. As used herein, a “CPN1 variant” is any CPN1-derived polypeptide having a modification to a wild type CPN1. As used herein, a “wild type CPN1” is a naturally-occurring CPN1 that is not a disease-causing CPN1. In some embodiments, the wild type CPN1 is a human CPN1. A CPN1 variant may also be referred to as a CPN variant, that is all CPN1 variants are CPN variants, but the opposite is not the case.

[0040] Table 1 provides SEQ ID NO: 6, the full length human wild type CPN1. Table 1 provides the amino acid sequences of human wild-type CPN1 (SEQ ID NO: 1) and CPB2 (SEQ ID NO: 2), inclusive of their signal sequences. The peptide signal sequence of each are indicated in bolded letters. The terms “peptide signal”, “signal peptide”, and “signal sequence” are used interchangeably herein. The underlined residues and slash in the amino acid sequence of CPB2 presented in SEQ ID NO: 2 shows the thrombin-thrombomodulin (T-TB) cleavage sequence. Also provided in Table 1 is an exemplary CPN1 variant fused to an activation peptide T-TB from CPB2, shown in SEQ ID NO: 3.

[0041] Table 1 provides a number of human CPN1 amino acid sequences, some of which are truncation variants of full length human wild type CPN1 of SEQ ID NO: 6. The sequences of Table 1 include: SEQ ID NO: 1, which constitutes full length human wild type CPN1 with a signal peptide (referred to herein as hCPN1 (1-438) with a signal peptide); SEQ ID NO: 6, which constitutes full length human wild type CPN1, (referred to herein as hCPN1 (1-438); SEQ ID NO: 7, which constitutes the N-terminal amino acids 1-398 of SEQ ID NO: 6 (referred to herein as hCPN1 (1-398), a CPN1 truncation variant); SEQ ID NO: 11, which constitutes the N-terminal amino acids 1-397 of SEQ ID NO: 6 (referred to herein as hCPN1 (1-397), a CPN1 truncation variant); SEQ ID NO: 12, which constitutes the N-terminal amino acids 1-396 of SEQ ID NO: 6 (referred to herein as hCPN1 (1-396), a CPN1 truncation variant); SEQ ID NO: 8, which constitutes the N-terminal amino acids 1-320 of SEQ ID NO: 6 (referred to herein as hCPN1 (1-320), a CPN1 truncation variant). One or more of these hCPN1 sequences are further modified to generate the CPN1 variants of the disclosure, as exemplified in Tables 3A-4C and 4A-4C. These hCPN1 sequences, including variants thereof, are also used as core molecules for the fusion constructs of the disclosure, as provided in Tables 2 and 5.

[0042] In some embodiments, the CPN1 variants provided herein are useful for treatment of a subject in need thereof. As used herein, the terms “patient” or “subject” refer to any vertebrate including, without limitation, humans and other primates (e.g., chimpanzees, cynomolgus monkeys, and other apes and monkey species), farm animals (e.g., cattle, sheep, pigs, goats and horses), domestic mammals (e.g., dogs and cats), laboratory animals (e.g., rabbits, rodents such as mice, rats, and guinea pigs), and birds (e.g., domestic, wild and game birds such as chickens, turkeys and other gallinaceous birds, ducks, geese, and the like). In some embodiments, the subject is a mammal. In exemplary embodiments, the subject is a human.

[0043] In some embodiments, provided are CPN2 variants; a CPN2 variant may comprise one or more modifications with respect to hCPN1 (1-456), SEQ ID NO: 10.

[0044] In some embodiments, the CPN1 variant of the disclosure comprises at least 70%, at least 75%, at least 80%, at least 85%, at least 90%, at least 91%, at least 92%, at least 93%, at least 94%, at least 95%, at least 96%, at least 97%, at least 98%, or even at least 99% sequence identity to SEQ ID NO: 6.

[0045] In some embodiments, the CPN1 variant of the disclosure comprises at least 70%, at least 75%, at least 80%, at least 85%, at least 90%, at least 91%, at least 92%, at least 93%, at least 94%, at least 95%, at least 96%, at least 97%, at least 98%, or even at least 99% sequence identity to SEQ ID NO: 7.

[0046] In some embodiments, the CPN1 variant of the disclosure comprises at least 70%, at least 75%, at least 80%, at least 85%, at least 90%, at least 91%, at least 92%, at least 93%, at least 94%, at least 95%, at least 96%, at least 97%, at least 98%, or even at least 99% sequence identity to SEQ ID NO: 8.

[0047] In some embodiments, the CPN1 variant of the disclosure comprises at least 70%, at least 75%, at least 80%, at least 85%, at least 90%, at least 91%, at least 92%, at least 93%, at least 94%, at least 95%, at least 96%, at least 97%, at least 98%, or even at least 99% sequence identity to SEQ ID NO: 11.

[0048] In some embodiments, the CPN1 variant of the disclosure comprises at least 70%, at least 75%, at least 80%, at least 85%, at least 90%, at least 91%, at least 92%, at least 93%, at least 94%, at least 95%, at least 96%, at least 97%, at least 98%, or even at least 99% sequence identity to SEQ ID NO: 12.

[0049] In some embodiments, the CPN1 variant of the disclosure comprises SEQ ID NO: 6, SEQ ID NO: 7, SEQ ID NO: 8, SEQ ID NO: 11, or SEQ ID NO:12, comprising one of the modification strings selected from the group consisting of the modification strings provided in Table 4A, Table 4B, and Table 4C.

[0050] In some embodiments, the CPN1 variant of the disclosure comprises SEQ ID NO: 6, SEQ ID NO: 7, SEQ ID NO: 8, SEQ ID NO: 11, or SEQ ID NO:12, comprising one of the modification strings selected from the group consisting of the modification strings provided in Table 3A, Table 3B, and Table 3C.

[0051] In some embodiments, a CPN1 variant comprise one or more modifications with respect to hCPN1 (1-438), SEQ ID NO: 6. Table 4C of the disclosure provides exemplary modifications of hCPN1 (1-438), SEQ ID NO: 6, listed singly. Accordingly, a CPN1 variant of the disclosure may comprise one or more of the modifications provided in Table 4C. Table 3C of the disclosure provides exemplary modification strings of hCPN1 (1-438), SEQ ID NO: 6. Accordingly, a CPN1 variant of the disclosure may comprise one of the modification strings provided in Table 3C.

[0052] In some embodiments, a CPN1 variant comprise one or more modifications with respect to hCPN1 (1-398), SEQ ID NO: 7. Table 4A of the disclosure provides exemplary modifications of hCPN1 (1-398), SEQ ID NO: 7 listed singly. Accordingly, a CPN1 variant of the disclosure may comprise one or more of the modifications provided in Table 4A. Table 3A of the disclosure provides exemplary modification strings of hCPN1 (1-398), SEQ ID NO: 7. Accordingly, a CPN1 variant of the disclosure may comprise one of the modification strings provided in Table 3A.

[0053] In some embodiments, a CPN1 variant comprise one or more modifications with respect to hCPN1 (1-397), SEQ ID NO: 11.

[0054] In some embodiments, a CPN1 variant comprise one or more modifications with respect to hCPN1 (1-396), SEQ ID NO: 12.

[0055] In some embodiments, a CPN1 variant is hCPN1 (1-320) (also referred to herein as hCPN1 (1-320) Delta TT), SEQ ID NO: 8. The amino acid sequence of hCPN1 (1-320), SEQ ID NO: 8, is a C-terminal truncation of the transthyretin (TT) domain of hCPN1 (1-398), SEQ ID NO: 7. In some embodiments, a CPN1 variant comprise one or more modifications with respect to hCPN1 (1-320), SEQ ID NO: 8. Table 4B of the disclosure provides exemplary modifications of hCPN1 (1-320), SEQ ID NO: 8, listed singly. Accordingly, a CPN1 variant of the disclosure may comprise one or more of the modifications provided in Table 4B. Table 3B of the disclosure provides exemplary modification strings of hCPN1 (1-320), SEQ ID NO: 8. Accordingly, a CPN1 variant of the disclosure may comprise one of the modification strings provided in Table 3B.

[0056] In some embodiments, the CPN1 variants provided herein are in an active form. In other embodiments the CPN1 variants are provided in an inactive, zymogen form.

### Improved Characteristics of the CPN1 Variants

[0057] The CPN1 variants provided herein may modulate activity of the complement system, and have at least one improved characteristic as compared to a wild type CPN1. In some embodiments, the CPN1 variants provided herein have at least one improved characteristic as compared to the wild type CPN1, wherein the wild type CPN1 is a human CPN1. In some embodiments, the improved characteristic includes, but is not limited to, an increase or a decrease in any one or more of: half-life, activity, potency, affinity for one or more substrates, sensitivity, cofactor affinity, stability, and catalytic capability.

[0058] In some embodiments, the CPN1 variants do not require a CPN2 for activity. In some embodiments, the CPN1 variants exhibit a higher affinity for C3a, C5a, or both C3a and C5a. In some embodiments the CPN1 variants are part of a fusion construct comprising additional N-terminal and C-terminal domains. In some embodiments, the CPN1 variants are non-immunogenic.

[0059] In some embodiments, the at least one improved characteristic comprises an increase in affinity for one or more substrates, wherein at least one substrate is C3a. In some embodiments, the at least one improved characteristic comprises an increase in affinity for one or more substrates, wherein at least one substrate is C5a. In some embodiments, the CPN1 variants provided herein are inactive towards the C5adesArg and C3aDesArg.

[0060] In some embodiments, the increase in activity of a CPN1 variant of the disclosure, as compared to a wild type CPN1, comprises an increase in the cleavage of C3a and/or C5a.

[0061] In some embodiments, the increase in activity of a CPN1 variant of the disclosure, as compared to a wild type CPN1, comprises an increased k_{cat}/K_{M} (M⁻¹ s⁻¹) for cleavage of C3a and/or C5a.

[0062] In some embodiments, the increased k_{cat}/K_{M} (M⁻¹ s⁻¹) for cleavage of C3a and/or C5a exhibited by a CPN1 variant is about 2-fold, about 3-fold, about 4-fold, about 5-fold, about 6-fold, about 7-fold, about 8-fold, about 9-fold, about 10-fold greater than that of the wild type CPN1.

[0063] In some embodiments, the increase in activity of a CPN1 variant of the disclosure, as compared to a wild type CPN1, comprises an increase in k_{cat} with a decrease in K_{M}. Generally, an increase in k_{cat} with a decrease in K_{M} is an increase in affinity, and therefore, in some embodiments, the increase in activity comprises an increase in affinity for a substrate.

[0064] In some embodiments, the increase in activity of a CPN1 variant of the disclosure, as compared to a wild type CPN1, comprises decrease in K_{D} (nM) value for cleavage of C3a and/or C5a. Generally, a decrease in K_{D} value is an increase in affinity, and therefore, in some embodiments, the increase in activity comprises a decrease in K_{D} value. In some embodiments, the decreased K_{D} (nM) value is about 2-fold, about 3-fold, about 4-fold, about 5-fold, about 6-fold, about 7-fold, about 8-fold, about 9-fold, about 10-fold less than that of the wild type CPN1.

[0065] In some embodiments, the increase in activity of a CPN1 variant of the disclosure, as compared to a wild type CPN1, comprises a decrease in EC₅₀ (nM) value for cleavage of C3a and/or C5a, compared to the wild type CPN. Generally, a decrease in EC₅₀ is an increase in affinity, and therefore, in some embodiments, the increase in activity comprises a decrease in EC₅₀.

[0066] In some embodiments, the decreased EC₅₀ (nM) value for cleavage of C3a and/or C5a is ranges from about 0.1 nM to about 20 nM. In some embodiments, the value is about 20 nM, or is lower than about 20 nM, e.g. about 10 nM, or about 15 nM, In some embodiments, the decreased EC₅₀ value for cleavage is about 1 nM, about 0.1 nM, or less than about 0.1 nM.

[0067] In some embodiments, the improved characteristic of a CPN1 variant of the disclosure, as compared to a wild type CPN1, is an increased half-life, wherein the increased half-life is half-life in plasma. In some embodiments, the increased half-life in plasma is greater than about 24 hours. In some embodiments, the increased half-life in plasma is about 48 hours, about 50 hours, about 60 hours, about 70 hours, about 80 hours, about 90 hours, about 100 hours, or about 150 hours. In some embodiments, the increased half-life in plasma is from about 70 hours to about 150 hours.

[0068] In some embodiments, the improved characteristic of a CPN1 variant of the disclosure, as compared to a wild type CPN1, is an increased sensitivity for a substate, wherein the increased sensitivity comprises increased in catalytic activity upon complement activation.

[0069] The CPN1 variants can be generated by introducing one or more modifications to a wild type CPN1. In some embodiments, the CPN1 variant comprises at least one modification corresponding to a wild type non-human CPN1.

[0070] In some embodiments, a modification to the amino acid sequence as set forth in SEQ ID NO: 6 can increase affinity of a CPN1 variant for C3a and/or C5a as compared to a CPN that is not modified. In some embodiments, a modification to the amino acid sequence as set forth in SEQ ID NO: 6 includes a truncation of a loop domain.

[0071] In some embodiments, the CPN1 variant comprises the deletion of one or more amino acid residues, e.g., a truncated CPN1 variant of the disclosure may be selected from the group consisting of SEQ ID NO: 7, SEQ ID NO: 8, SEQ ID NO: 11, and SEQ ID NO: 12. These truncated variants can further serve as base molecules for fusion constructions comprising CPN1 variants of the disclosure.

### Fusion Constructs

[0072] Provided herein are fusion constructs comprising wild type CPN1 or any of the CPN1 variants described herein.

[0073] In some embodiments, provided herein are CPN1-containing fusion constructs (fusions to other proteins or components), referred to herein as “CPN1 constructs”. In some embodiments, CPN1 constructs comprise a fusion to a protein or component that is from CPN (such as CPN2). In some embodiments, CPN1 constructs comprise a fusion to a protein or component that is not from CPN. For example, such components can be, but are not limited to, other members of the carboxypeptidase family such as CPB2, or a half-life extenders (e.g. albumin).

[0074] In some embodiments, hCPN1 (1-438), SEQ ID NO: 6 can be considered a core CPN1 molecule based upon which fusion constructs are generated. In some embodiments, hCPN1 (1-398), SEQ ID NO: 7 can be considered a core CPN1 molecule based upon which fusion constructs are generated. In some embodiments, hCPN1 (1-320), SEQ ID NO: 8 can be considered a core CPN1 molecule based upon which fusion constructs are generated.

[0075] In some embodiments, the fusion construct comprises hCPN1 (1-398), SEQ ID NO: 7. In some embodiments, the fusion construct comprises hCPN1 (1-320), SEQ ID NO: 8. In some embodiments, the fusion construct comprises hCPN1 (1-396), SEQ ID NO: 12. In some embodiments, the fusion construct comprises hCPN1 (1-397), SEQ ID NO: 11. In some embodiments, the fusion construct comprises hCPN1 (1-438), SEQ ID NO: 6. In some embodiments, the fusion construct comprises hCPN2 (1-456), SEQ ID NO: 14. In some embodiments, the fusion construct comprises hCPN2 (1-524), SEQ ID NO: 13.

[0076] Table 1 provides exemplary components of certain fusion constructs of the disclosure. Table 2 lists exemplary CPN1-containing fusion constructs of the disclosure and their amino acid sequences. In some embodiments the construct comprises one or more of a signal sequence, N-terminal fusion partner 2, N-terminal linker 2, N-terminal fusion partner 1, N-terminal linker 1, a core CPN molecule (such as hCPN1 (1-398), SEQ ID NO: 7, or hCPN1 (1-320), SEQ ID NO: 8), C-terminal linker 1, C-terminal fusion partner, C-terminal linker 2, C-terminal fusion partner 2.

[0077] In some embodiments the fusion construct comprises one or more of Human Serum Albumin (HSA), the signal sequence of HSA, the signal sequence of Azurocidin, the signal sequence of interleukin 2, the signal sequence of immunoglobin G, the activation peptide of CPB2 (the N-terminal 96 amino acids of CPB2 protease), Small Ubiquitin Modifying enzyme (SUMO), 10 histidine residues followed by SUMO, Tobacco Etch Virus (TEV) protease cleavage site, linkers consisting of amino acids (such as repeating GS) of various lengths (such as 8, 12, or 20 amino acid residues), His-tag, Fc region (the fragment crystallizable region is the tail region of an antibody that interacts with cell surface receptors called Fc receptors and some proteins of the complement system), mutations introduced in the Fc region (such as no 1st DK LALA-PG), Xa (factor Xa protease cleavage site), mammalian maltose binding protein (mMBP), CPB2, and/or CPN2. To the extent certain abbreviations are provided herein, including the drawings, reference is made to the abbreviations in Table 1.

[0078] Table 5 provides the full amino acid sequences of exemplary fusion constructs of the disclosure. Accordingly, in some embodiments, provided herein is a CPN1 fusion construct selected from any of those presented in Table 5. Also provided in Table 5 are optional signal sequence peptides that may be used for the expression of the fusion constructs presented therein.

[0079] In some embodiments the activation peptide of CPB2 (the N-terminal 96 amino acids of CPB2 protease) may be mutated to improve binding with CPN1, and is included in a fusion construct of the disclosure.

[0080] FIG. 2 depicts a schematic diagram of CPB2 (also known as carboxypeptidase U (CPU), plasma carboxypeptidase B (pCPB) or thrombin-activatable fibrinolysis inhibitor (TAFI)), another member of the carboxypeptidase M14 family, which has similar substrates as CPN1. Because CPB2 is secreted as a zymogen in circulation, its domains may be useful in the modification of CPN1 to generate CPN1 zymogen constructs. CPB2 includes an activation peptide (cleavable substrate) and is endogenously activated by thrombin-thrombomodulin or plasmin but is also sensitive to mannan-binding lectin serine protease 1 (MASP1) cleavage in vitro.

[0081] As discussed above, it should be understood that a CPN1 variant may also be fused with another component, such as a half-life extender or a portion of another carboxypeptidase providing stability in circulation, as will be further discussed herein.

[0082] The fusion constructs of the disclosure may be engineered to display an increase in sensitivity comprises an increase in the sensitivity to any one or more of: Mannan-binding lectin serine protease 1 (MASP1), Mannan-binding lectin-associated serine protease 3 (MASP3), Factor D, methyl-accepting chemotaxis protein (mCPA3) secreted during mast cell degranulation, and cathepsin G secreted during neutrophil degranulation. In some embodiments, the decrease in sensitivity comprises decrease in thrombin-thrombomodulin.

[0083] In some embodiments, the fusion constructs provided herein comprise one or more of domains of CPN selected from: a first peptide signal, a catalytic domain (CPN1) or a portion of CPN1, an activation peptide sensitive to complement activation, and a regulatory subunit (CPN2) or a portion of CPN2. FIG. 3 depicts schematic diagrams of a number of exemplary fusion constructs, e.g. a CPN1 with its catalytic subunit alone, a CPN1 with its catalytic subunit plus its regulatory subunit. FIG. 3 also includes a schematic diagram of a CPB2 having a signal peptide (“peptide signal” in FIG. 3 schematics), an activation peptide (AP) domain, and a catalytic domain. By way of example, a fusion construct can include an activation peptide or a portion of the activation peptide from CPB2, and in some embodiments, can be expressed as a single heterodimer.

[0084] It should be understood that, while exemplary fusion constructs disclosed herein can include an activation peptide, any of the fusion constructs disclosed herein can be provided optionally without an activation peptide, or optionally with a first and a second activation peptide, or optionally with a single activation peptide.

[0085] Exemplary fusion constructs shown as schematic diagrams in FIG. 3 include:
[0086] (a) a fusion construct comprising a peptide signal, with an activation peptide from CPB2, a CPN1 domain, with a deletion of its CPN2;
[0087] (b) a fusion construct comprising a first peptide signal and CPN1 domain, and with an activation peptide from CPB2, and expressed as a heterodimer, also comprising a second peptide signal and its CPN2 domain;
[0088] (c) a fusion construct comprising a peptide signal, an activation peptide from CPB2, a CPN1 domain, a linker, and a CPN2 domain;
[0089] (d) a fusion construct comprising a peptide signal, an activation peptide from CPB2, a CPN1 domain, a linker, and a half-life extender (human serum albumin shown as an exemplary half-life extender).

[0090] Further, any of the fusion construct provided herein can be HSA-tagged, or His-tagged, as is also shown in FIG. 3 as examples.

[0091] In some embodiments, a fusion construct comprises at least one non-CPN domain or component. In such embodiments, the insertion of the at least one non-CPN domain of component can help to stabilize the CPN1 domain, such that the deletion of the CPN2 domain does not reduce the clearance of the CPN1 domain from plasma, for example.

[0092] In some embodiments, the at least one non-CPN domain or component comprises at least one domain of carboxypeptidase B2 (CPB2). In some embodiments, the CPB2 is a human CPB2, SEQ ID NO: 2. In some embodiments, the at least one domain of CPB2 comprises an activation peptide.

[0093] In some embodiments, the fusion construct comprises at least one modification corresponding to a wild type CPN1 comprising the amino acid sequence as set forth in SEQ ID NO: 3.

[0094] FIG. 4A depicts schematic diagrams of fusion constructs comprising various activation peptides to alter the sensitivity to certain complement components. In some embodiments, the activation peptide increases sensitivity of the fusion construct for any one or more of: MASP1, MASP3, Factor D, mCPA3, or cathepsin G. By way of example, an increased sensitivity for select complement components can direct activity of the fusion construct in the classical, alternate, and lectin pathways. In some embodiments, the fusion construct is not activated by thrombin-thrombomodulin. Exemplary fusion constructs comprising an activation peptide from CPB2 shown as schematic diagrams in FIG. 4A include the activation peptides for the following:
[0095] (a) an activation peptide for thrombin-thrombomodulin (T-TB), which can be used as a starting point for generation of peptide libraries that are more sensitive to MASP1, MASP3, Factor D, mCPA3, or cathepsin G, and less sensitive to T-TB;
[0096] (b) an activation peptide for MASP1, which can increase sensitivity to MASP1, within the classical pathway of the complement system;
[0097] (c) an activation peptide for MASP3, which can increase sensitivity to MASP3, within the alternate pathway of the complement system;
[0098] (d) an activation peptide for Factor D, which can increase sensitivity to Factor D, within the alternate pathway of the complement system;
[0099] (e) an activation peptide for mCPA3, which can increase sensitivity to mast cell degranulation, for mast cell diseases;
[0100] (f) an activation peptide for cathepsin G, which can increase sensitivity to neutrophil degranulation, within the classical, alternate, and/or lectin pathways of the complement system.

[0101] The fusion constructs may be designed with an activation peptide sensitive to neutrophil or mast cell activation. Neutrophil-sensitive activation peptide can allow targeting ANCA and a mast cell-activation peptide can allow targeting skin HS and a broad range of mast cell related disorders.

[0102] As noted above, also provided herein are fusion constructs comprise one or more domains of a non-CPN component, such as a non-CPN carboxypeptidase. In some embodiments, the activation peptide of a fusion construct masks the catalytic site of CPN1. An exemplary CPN fusion construct with this property is a CPN1-CPB2 chimera. FIGS. 4B-4C depict the structure of a CPN1-CPB2 chimera, showing the CPB2 activation peptide (TAFI activation peptide) masking the catalytic site of CPN1, and a schematic diagram of the fusion construct, respectively. The inclusion of a mask effectively allows the CPN1 containing fusion construct to be delivered in a zymogen format.

[0103] Another example of such a fusion construct is a fusion of CPN1 and carboxypeptidase A4 (CPA4). FIGS. 4D-4E depict the structure of a CPN1-CPA4 fusion construct, and a surface representation of the same, respectively. These figures show that the activation peptide from CPA4 masks the catalytic site of CPN1.

[0104] Another example of such a fusion construct is a fusion of CPN1 and carboxypeptidase A1 (CPA1). FIGS. 4F-4G depict the structure of a CPN1-CPA1 fusion, and a surface representation of the same, respectively. These figures show that the activation peptide from CPA1 masks the catalytic site of CPN1.

[0105] In some embodiments, the activation peptide increases sensitivity of the fusion construct for any one or more of: mast cell degranulation, neutrophil degranulation, and inflammatory cell activation. In some embodiments, the activation peptide increases sensitivity of the fusion construct to complement activation.

[0106] In some embodiments, fusion construct is a fusion and comprises at least one CPB2 domain which comprises any one or more of: a CPB2 catalytic domain, a CPA1 catalytic domain, and a CPA4 catalytic domain.

[0107] In some embodiments, the fusion construct comprises a structural arrangement from N-terminus to C-terminus as (first peptide signal)-(CPB2 activation peptide)-(CPN2). In some embodiments, the fusion construct comprises a structural arrangement from C-terminus to N-terminus as (first peptide signal)-(CPB2 activation peptide)-(CPN2). In some embodiments, the fusion construct comprises a structural arrangement from N-terminus to C-terminus as (mMBP)-(optional linker)-(TEV)-(optional linker)-(CPN1 core molecule)-(optional linker)-(HSA). In some embodiments, the fusion construct comprises a structural arrangement from N-terminus to C-terminus as (mMBP)-(optional linker)-(TEV)-(optional linker)-(CPN1 core molecule). In some embodiments, the fusion construct comprises a structural arrangement from N-terminus to C-terminus as (mMBP)-(optional linker)-(TEV)-(optional linker)-(core CPN1 molecule)-(optional linker)-(TEV)-(optional linker)-(HSA). The mMBP can be SEQ ID NO: 30, the optional linker can be SEQ ID NOS: 26, 32, 33, 34, 35, 36, 37, 38, 39, 41, 42, or 43. The core CPN1 molecule can be SEQ ID NOS: 1, 6, 7, 11, 12, or 8. The TEV can be SEQ ID NO:25. The HSA can be SEQ ID NO: 17. In some embodiments, the fusion construct comprises a structural arrangement from N-terminus to C-terminus as (GST)-(optional linker)-(TEV)-CPN1 core molecule)-(optional linker)-(HSA). In some embodiments, the fusion construct comprises a structural arrangement from N-terminus to C-terminus as (GST)-(optional linker)-(TEV)-(optional linker)-(CPN core molecule)-(optional linker)-(TEV)-(optional linker)-(HSA). In some embodiments, the fusion construct comprises a structural arrangement from N-terminus to C-terminus as (GST)-(optional linker)-(TEV)-(core CPN1 molecule). The GST can be SEQ ID NO: 31. In some embodiments, the fusion construct comprises a structural arrangement from N-terminus to C-terminus as (GHHHHHHHHHH)-(optional linker)-(SUMO)-(CPN1 core molecule). In some embodiments, the fusion construct comprises a structural arrangement from N-terminus to C-terminus as (GHHHHHHHHHH)-(optional linker)-(SUMO)-(CPN1 core molecule)-(optional linker)-(HSA). The GHHHHHHHHHH can be SEQ ID NO: 34. The SUMO can be SEQ ID NO: 24. In some embodiments, the fusion construct comprises a structural arrangement from N-terminus to C-terminus as (CPB2-Activation Peptide)-(optional linker)-(CPN1 core molecule). The CPB2-Activation Peptide can be SEQ ID NO: 22 In some embodiments, the fusion construct comprises a structural arrangement from N-terminus to C-terminus as (CPB2-Activation Peptide)-(optional linker)-(CPN1 core molecule)-(optional linker)-(HHHHHH). The HHHHHH can be SEQ ID NO: 40. In some embodiments, the fusion construct comprises a structural arrangement from N-terminus to C-terminus as (CPB2-Activation Peptide)-(optional linker)-(CPN1 core molecule)-(optional linker)-(HSA). In some embodiments, the fusion construct comprises a structural arrangement from N-terminus to C-terminus as (CPB2-Activation Peptide)-(optional linker)-(CPN1 core molecule)-(optional linker)-(hCPN2 (1-339)). In some embodiments, the fusion construct comprises a structural arrangement from N-terminus to C-terminus as (CPB2-Activation Peptide)-(optional linker)-(CPN1 core molecule)-(optional linker)-(hCPN2 (1-339))-(optional linker)-(HHHHHH). In some embodiments, the fusion construct comprises a structural arrangement from N-terminus to C-terminus as (CPN1 core molecule)-(optional linker)-(hCPN2 (1-339)). In some embodiments, the fusion construct comprises a structural arrangement from N-terminus to C-terminus as (CPN1 core molecule)-(optional linker)-(hCPN2 (1-339))-(optional linker)-(HHHHHH). In some embodiments, the fusion construct comprises a structural arrangement from N-terminus to C-terminus as (CPN1 core molecule)-(optional linker)-(hCPN2 (1-456)). The hCPN2 (1-456) can be SEQ ID NO: 10. In some embodiments, the fusion construct comprises a structural arrangement from N-terminus to C-terminus as (CPN1 core molecule)-(optional linker)-(HHHHHH). In some embodiments, the fusion construct comprises a structural arrangement from N-terminus to C-terminus as (CPN1 core molecule)-(optional linker)-(HSA). In some embodiments, the fusion construct comprises a structural arrangement from N-terminus to C-terminus as (CPN1 core molecule)-(optional linker)-(HSA)-(optional linker)-(HHHHHH). In some embodiments, the fusion construct comprises a structural arrangement from N-terminus to C-terminus as (CPN1 core molecule)-(optional linker)-(TEV)-(optional linker)-(HSA). In some embodiments, the fusion construct comprises a structural arrangement from N-terminus to C-terminus as (CPN1 core molecule)-(optional linker)-(TEV)-(optional linker)-(Fc (no 1st DK LALA-PG)). The Fc (no 1st DK LALA-PG) can be SEQ ID NO: 28. In some embodiments, the fusion construct comprises a structural arrangement from N-terminus to C-terminus as (CPN1 core molecule)-(optional linker)-(Xa)-(optional linker)-(Fc (no 1st DK LALA-PG)). The Xa can be SEQ ID NO: 29. In some embodiments, the fusion construct comprises a structural arrangement from N-terminus to C-terminus as (CPN1 core molecule)-(optional linker)-(Xa)-(optional linker)-(HSA). In some embodiments, the fusion construct comprises a structural arrangement from N-terminus to C-terminus as (CPN1 core molecule)-(optional linker)-(HSA)-(optional linker)-(HHHHHHHHHH). In some embodiments, the fusion construct comprises a structural arrangement from N-terminus to C-terminus as CPN1 core molecule)-(optional linker)-(HSA).

[0108] Table 2 provides exemplary fusion constructs. The column titled “Const. No.” refers to the construct number, a unique number assigned to the construct. Each component of the fusion protein is presented from the N-terminus to the C-terminus in the subsequent columns, presented from N-terminus to C-terminus. If a cell is blank that indicates that the particular construct does not contain that component.

[0109] For example, the component in the left-most side of the table, if present, is found in the far N-terminus, labeled as “N2 Term.” This may then be connected via linker (“N2 Linker”) to another component in the N Terminus, if present, is closer to the core molecule, labeled “N Term.” The “N Term” component may then connected to the core molecule via an optional linker labeled “N Linker.” The column entitled “core” denotes the core CPN1 or CPN2 molecule, making reference to exemplary molecules in Table 1. To the right of the core molecule is an optional “C Linker”, which if present, links the core to a component in the “C Term,” which, in present, is in turn is connected to a “C2 Term” component via an optional “C2 Linker.”

[0110] In some embodiments, the fusion constructs provided herein are fused to a first non-CPN domain or component, and a second non-CPN domain or component. In some embodiments, the non-CPN domain or component is a half-life extender. In some embodiments, the half-life extender is selected from the group consisting of: PEGylation, PASylation, carbohydrates, albumin, and Fc. In some embodiments, the fusion is at the C-terminal end of the CPN1 core. In some embodiments, the fusion is at the N-terminal end of the fusion construct. In some embodiments, the fusion is at both the C-terminal and N-terminal ends of the CPN1 core. Other exemplary chimeras include fusions of CPN1 with: a portion of a redesigned CPN2, a portion of CPB2 activation peptide, or other CPB2 domains.

[0111] In some embodiments, the fusion of at least one non-CPN domain or component comprises a first non-CPN domain or component a second non-CPN domain or component. In some embodiments, the fusion construct comprises a structural arrangement from N-terminus to C-terminus as (first peptide signal)-(first non-CPN domain or component)-(CPN2)-(second non-CPN domain or component). In some embodiments, the fusion construct comprises a structural arrangement from C-terminus to N-terminus as (first peptide signal)-(first non-CPN domain or component)-(CPN2)-(second non-CPN domain or component). In some embodiments, the first non-CPN domain or component is an activation peptide. In some embodiments, the second non-CPN domain or component is a half-life extender. It may be advantageous in some embodiments to increase the half-life of CPN1. Exemplary half-life extenders include, but are not limited to albumin, such as human serum albumin, PEG, a non-biodegradable polymer, a biodegradable polymer, and Fc. Addition of a half-life extender can also increase or alter other properties of the fusion constructs provided herein, such as, but not limited to, bioavailability, trafficking ability, and immunogenicity.

[0112] In some embodiments, the half-life extender is albumin. It is noted that as used herein, albumin refers to any albumin such as any serum albumin, or an albumin variant, or albumin derivative. In exemplary embodiments, the albumin is human serum albumin (HSA). Exemplary albumin containing CPN1 fusion constructs of the disclosure are provided Table 2 and Table 5.

[0113] In some embodiments, the addition of a component or domain to a fusion construct of the disclosure can be directly to the CPN1 variant core molecule. In some embodiments, the addition of a component or domain to a fusion construct of the disclosure can be through a linker or multiple linkers.

[0114] As discussed above, CPN is endogenously found as a tetramer. Accordingly, in some embodiments, the CPN variants provided herein are a tetramer comprising two heterodimers. In some embodiments, the CPN variants provided herein is a single heterodimer.

[0115] In some embodiments, the CPN1 variants or fusion constructs provided herein are in a zymogen form. In such embodiments, the CPN1 variants or fusion constructs engineered as a zymogen can be activated in situ at the site of dysregulated complement. By way of example, a fusion construct can be provided fused an activation peptide, such as an activation peptide from CPB2, which can be cleaved at the site of dysregulated complement, such as by MASP1, MASP3, Factor D, mCPA3, or cathepsin G.

[0116] In some embodiments, the fusion constructs provided herein are in an active form.

### Uses

[0117] Provided herein are methods of treating a disease or condition in a subject in need thereof, comprising administering to the subject any one of the CPN1 variants or fusion constructs provided herein.

[0118] In some embodiments, the disease or condition is an acute condition. In some embodiments, the disease or condition is an acute condition, and the CPN1 variant or fusion construct of the disclosure is short-lived and highly active. Examples of acute conditions for which such fusion constructs and variants can be useful include, but are not limited to, acute respiratory distress syndrome (ARDS), COVID-19, multisystem organ failure, and sepsis. Additionally, such fusion constructs and variants can be useful for acute disease in which significant complement activation occurs during extracorporeal blood treatment by cardiopulmonary bypass surgery, ischemia/reperfusion, and dialysis. These can contribute to complications of these procedures.

[0119] In some embodiments, the disease or condition is a chronic condition. In some embodiments, the disease or condition is a chronic condition, and the fusion constructs or and variants have an extended half-life, and/or with a modified catalytic activity with respect to a wild type CPN1 or wild type CPN tetramer. Examples of chronic conditions for which such fusion constructs and variants can be useful include, but are not limited to, anti-neutrophil cytoplasmic autoantibody (ANCA) vasculitis, atypical hemolytic uremic syndrome (aHUS), and IgA nephropathy.

[0120] In some embodiments, the disease or condition is selected from the group consisting of: congenital complement deficiency, control protein deficiency, secondary complement disorder, immunity related disorder, chronic renal disorder, acute inflammatory disorder, antineutrophil cytoplasmic antibody (ANCA)-associated vasculitis (AAV), C3 glomerulopathy (C3G), lupus nephritis, skin disorder, intestinal ischemia and reperfusion (I/R) injury, and sepsis. In some embodiments, the disease or condition is a skin disorder selected from the group consisting of: hidradenitis suppurativa (HS), bullous pemphigoid (BP), and Pyoderma Gangrenosum.

### Administration

[0121] The in vivo administration of the CPN1 variants and fusion constructs described herein may be carried out intravenously, intramuscularly, subcutaneously, intravitreally, topically, orally, transdermally, intraperitoneally, intraorbitally, intrathecally, intraventricularly, intranasally, transmucosally, through implantation, or through inhalation. Administration may be performed with any suitable excipients, carriers, or other agents to provide suitable or improved tolerance, transfer, delivery, and the like.

[0122] In exemplary embodiments, administration of the therapeutic variants and fusion constructs described herein is a subcutaneous administration.

[0123] In exemplary embodiments, administration of the therapeutic variants and fusion constructs described herein is an intravenous administration.

[0124] Administration may be effectuated by delivery of the variant or fusion construct itself, or a gene therapy based delivery, using, for example, a viral vector.

### Production

[0125] Provided herein are nucleic acids encoding the CPN1 variants of the disclosure, and vector comprising such nucleic acids. Also provided herein are nucleic acids encoding the fusion constructs of the disclosure, and vector comprising such nucleic acids. These are useful in using recombinant systems for production. Mammalian host cells may be used for production, including, for example human and non-human cell production systems. Exemplary mammalian cells for production include, but are not limited to CHO cells, or HEK cells. Alternatively, non-mammalian systems may be used for recombinant production of the variants and fusion constructs of the disclosure, such as bacterial host systems (e.g. E. Coli), yeast, and insect cell systems. It is understood that the nucleic acids encoding the variants and fusion constructs of the disclosure may be codon optimized, to maximize production. The variants and fusion constructs provided herein can be cloned or isolated using any available methods known in the art for cloning and isolating nucleic acid molecules.

### TABLES

[0126] Provided here are the Tables made reference herein.

TABLE 1
Exemplary Components

| Name | Description | Amino Acid Sequence |
|---|---|---|
| hCPN1 (1- | Full length wild | MSDLLSVFLHLLLLFKLVAPVTFRHHRYDDLVRTLYKVQNECPGITRV |
| 438) with a | type human | YSIGRSVEGRHLYVLEFSDHPGIHEPLEPEVKYVGNMHGNEALGRELML |
| signal peptide | carboxypeptidase | QLSEFLCEEFRNRNQRIVQLIQDTRIHILPSMNPDGYEVAAAQGPNKPGY |
| | N 1, with a signal | LVGRNNANGVDLNRNFPDLNTYIYYNEKYGGPNHHLPLPDNWKSQVEP |
| | peptide | ETRAVIRWMHSFNFVLSANLHGGAVVANYPYDKSFEHRVRGVRRTAST |
| | | PTPDDKLFQKLAKVYSYAHGWMFQGWNCGDYFPDGITNGASWYSLSK |
| | | GMQDFNYLHTNCFEITLELSCDKFPPEEELQREWLGNREALIQFLEQVHQ |
| | | GIKGMVLDENYNNLANAVISVSGINHDVTSGDHGDYFRLLLPGIYTVSA |
| | | TAPGYDPETVTVTVGPAEPTLVNFHLKRSIPQVSPVRRAPSRRHGVRAKV |
| | | QPQARKKEMEMRQLQRGPA (SEQ ID NO: 1) |
| hCPN1 (1- | Full length wild | VTFRHHRYDDLVRTLYKVQNECPGITRVYSIGRSVEGRHLYVLEFSDHP |
| 438) | type human | GIHEPLEPEVKYVGNMHGNEALGRELMLQLSEFLCEEFRNRNQRIVQLIQ |
| | carboxypeptidase | DTRIHILPSMNPDGYEVAAAQGPNKPGYLVGRNNANGVDLNRNFPDLN |
| | N1 | TYIYYNEKYGGPNHHLPLPDNWKSQVEPETRAVIRWMHSFNFVLSANLH |
| | | GGAVVANYPYDKSFEHRVRGVRRTASTPTPDDKLFQKLAKVYSYAHG |
| | | WMFQGWNCGDYFPDGITNGASWYSLSKGMQDFNYLHTNCFEITLELSC |
| | | DKFPPEEELQREWLGNREALIQFLEQVHQGIKGMVLDENYNNLANAVIS |
| | | VSGINHDVTSGDHGDYFRLLLPGIYTVSATAPGYDPETVTVTVGPAEPTL |
| | | VNFHLKRSIPQVSPVRRAPSRRHGVRAKVQPQARKKEMEMRQLQRGPA |
| | | (SEQ ID NO: 6) |
| hCPN1 (1- | human | VTFRHHRYDDLVRTLYKVQNECPGITRVYSIGRSVEGRHLYVLEFSDHP |
| 398) | carboxypeptidase | GIHEPLEPEVKYVGNMHGNEALGRELMLQLSEFLCEEFRNRNQRIVQLIQ |
| | N 1, containing | DTRIHILPSMNPDGYEVAAAQGPNKPGYLVGRNNANGVDLNRNFPDLN |
| | only the N- | TYIYYNEKYGGPNHHLPLPDNWKSQVEPETRAVIRWMHSFNFVLSANLH |
| | terminal amino | GGAVVANYPYDKSFEHRVRGVRRTASTPTPDDKLFQKLAKVYSYAHG |
| | acids from 1-398 | WMFQGWNCGDYFPDGITNGASWYSLSKGMQDFNYLHTNCFEITLELSC |
| | | DKFPPEEELQREWLGNREALIQFLEQVHQGIKGMVLDENYNNLANAVIS |
| | | VSGINHDVTSGDHGDYFRLLLPGIYTVSATAPGYDPETVTVTVGPAEPTL |
| | | VNFHLKRS (SEQ ID NO: 7) |
| hCPN1 (1- | human | VTFRHHRYDDLVRTLYKVQNECPGITRVYSIGRSVEGRHLYVLEFSDHP |
| 397) | carboxypeptidase | GIHEPLEPEVKYVGNMHGNEALGRELMLQLSEFLCEEFRNRNQRIVQLIQ |
| | N 1, containing | DTRIHILPSMNPDGYEVAAAQGPNKPGYLVGRNNANGVDLNRNFPDLN |
| | only the N- | TYIYYNEKYGGPNHHLPLPDNWKSQVEPETRAVIRWMHSFNFVLSANLH |
| | terminal amino | GGAVVANYPYDKSFEHRVRGVRRTASTPTPDDKLFQKLAKVYSYAHG |
| | acids from 1-397 | WMFQGWNCGDYFPDGITNGASWYSLSKGMQDFNYLHTNCFEITLELSC |
| | | DKFPPEEELQREWLGNREALIQFLEQVHQGIKGMVLDENYNNLANAVIS |
| | | VSGINHDVTSGDHGDYFRLLLPGIYTVSATAPGYDPETVTVTVGPAEPTL |
| | | VNFHLKR (SEQ ID NO: 11) |
| hCPN1 (1- | human | VTFRHHRYDDLVRTLYKVQNECPGITRVYSIGRSVEGRHLYVLEFSDHP |
| 396) | carboxypeptidase | GIHEPLEPEVKYVGNMHGNEALGRELMLQLSEFLCEEFRNRNQRIVQLIQ |
| | N 1, containing | DTRIHILPSMNPDGYEVAAAQGPNKPGYLVGRNNANGVDLNRNFPDLN |
| | only the N- | TYIYYNEKYGGPNHHLPLPDNWKSQVEPETRAVIRWMHSFNFVLSANLH |
| | terminal amino | GGAVVANYPYDKSFEHRVRGVRRTASTPTPDDKLFQKLAKVYSYAHG |
| | acids from 1-396 | WMFQGWNCGDYFPDGITNGASWYSLSKGMQDFNYLHTNCFEITLELSC |
| | | DKFPPEEELQREWLGNREALIQFLEQVHQGIKGMVLDENYNNLANAVIS |
| | | VSGINHDVTSGDHGDYFRLLLPGIYTVSATAPGYDPETVTVTVGPAEPTL |
| | | VNFHLK (SEQ ID NO: 12) |
| hCPN1 (1- | human | VTFRHHRYDDLVRTLYKVQNECPGITRVYSIGRSVEGRHLYVLEFSDHP |
| 320 | carboxypeptidase | GIHEPLEPEVKYVGNMHGNEALGRELMLQLSEFLCEEFRNRNQRIVQLIQ |
| | N 1 C-terminal | DTRIHILPSMNPDGYEVAAAQGPNKPGYLVGRNNANGVDLNRNFPDLN |
| | truncation, | TYIYYNEKYGGPNHHLPLPDNWKSQVEPETRAVIRWMHSFNFVLSANLH |
| | containing only | GGAVVANYPYDKSFEHRVRGVRRTASTPTPDDKLFQKLAKVYSYAHG |
| | the N-terminal | WMFQGWNCGDYFPDGITNGASWYSLSKGMQDFNYLHTNCFEITLELSC |
| | amino acids from | DKFPPEEELQREWLGNREALIQFLEQVHQ (SEQ ID NO: 8) |
| | 1 to 320, deletion | |
| | of the transthyretin | |
| | domain | |
| hCPN2 (1- | Full length wild | MGWSLILLFLVAVATRVHSCPMGCDCFVQEVFCSDEELATVPLDIPPYT |
| 524) with | type human | KNIIFVETSFTTLETRAFGSNPNLTKVVFLNTQLCQFRPDAFGGLPRLEDL |
| signal peptide | carboxypeptidase | EVTGSSFLNLSTNIFSNLTSLGKLTLNFNMLEALPEGLFQHLAALESLHLQ |
| | N 2, with a signal | GNQLQALPRRLFQPLTHLKTLNLAQNLLAQLPEELFHPLTSLQTLKLSNN |
| | peptide | ALSGLPQGVFGKLGSLQELFLDSNNISELPPQVFSQLFCLERLWLQRNAIT |
| | | HLPLSIFASLGNLTFLSLQWNMLRVLPAGLFAHTPCLVGLSLTHNQLETV |
| | | AEGTFAHLSNLRSLMLSYNAITHLPAGIFRDLEELVKLYLGSNNLTALHP |
| | | ALFQNLSKLELLSLSKNQLTTLPEGIFDTNYNLFNLALHGNPWQCDCHLA |
| | | YLFNWLQQYTDRLLNIQTYCAGPAYLKGQVVPALNEKQLVCPVTRDHL |
| | | GFQVTWPDESKAGGSWDLAVQERAARSQCTYSNPEGTVVLACDQAQC |
| | | RWLNVQLSPQQGSLGLQYNASQEWDLRSSCGSLRLTVSIEARAAGP |
| | | (SEQ ID NO: 15) |
| hCPN2 (1- | Full length wild | CPMGCDCFVQEVFCSDEELATVPLDIPPYTKNIIFVETSFTTLETRAFGSNP |
| 524) | type human | NLTKVVFLNTQLCQFRPDAFGGLPRLEDLEVTGSSFLNLSTNIFSNLTSLG |
| | carboxypeptidase | KLTLNFNMLEALPEGLFQHLAALESLHLQGNQLQALPRRLFQPLTHLKT |
| | N 2 | LNLAQNLLAQLPEELFHPLTSLQTLKLSNNALSGLPQGVFGKLGSLQELF |
| | | LDSNNISELPPQVFSQLFCLERLWLQRNAITHLPLSIFASLGNLTFLSLQW |
| | | NMLRVLPAGLFAHTPCLVGLSLTHNQLETVAEGTFAHLSNLRSLMLSYN |
| | | AITHLPAGIFRDLEELVKLYLGSNNLTALHPALFQNLSKLELLSLSKNQLT |
| | | TLPEGIFDTNYNLFNLALHGNPWQCDCHLAYLFNWLQQYTDRLLNIQTY |
| | | CAGPAYLKGQVVPALNEKQLVCPVTRDHLGFQVTWPDESKAGGSWDL |
| | | AVQERAARSQCTYSNPEGTVVLACDQAQCRWLNVQLSPQQGSLGLQYN |
| | | ASQEWDLRSSCGSLRLTVSIEARAAGP (SEQ ID NO: 13) |
| hCPN2 (1- | wild type human | MGWSLILLFLVAVATRVHSCPMGCDCFVQEVFCSDEELATVPLDIPPYTK |
| 456) | carboxypeptidase | NIIFVETSFTTLETRAFGSNPNLTKVVFLNTQLCQFRPDAFGGLPRLEDLE |
| | N 2 containing | VTGSSFLNLSTNIFSNLTSLGKLTLNFNMLEALPEGLFQHLAALESLHLQG |
| | only the N- | NQLQALPRRLFQPLTHLKTLNLAQNLLAQLPEELFHPLTSLQTLKLSNNA |
| | terminal amino | LSGLPQGVFGKLGSLQELFLDSNNISELPPQVFSQLFCLERLWLQRNAITH |
| | acids from 1-456 | LPLSIFASLGNLTFLSLQWNMLRVLPAGLFAHTPCLVGLSLTHNQLETVA |
| | | EGTFAHLSNLRSLMLSYNAITHLPAGIFRDLEELVKLYLGSNNLTALHPA |
| | | LFQNLSKLELLSLSKNQLTTLPEGIFDTNYNLFNLALHGNPWQCDCHLAY |
| | | LFNWLQQYTDRLLNIQTYCAGPAYLKGQVVPALNEKQLVCPVTRDHLG |
| | | FQVTWPDESKAGGSWDLAVQERAA (SEQ ID NO: 10) |
| CPB2 with | Wild-type human | MKLCSLAVLVPIVLFCEQHVFAFQSGQVLAALPRTSRQVQVLQNLTTT |
| signal peptide | CPB2 (with signal | YEIVLWQPVTADLIVKKKQVHFFVNASDVDNVKAHLNVSGIPCSVLLAD |
| | peptide) | VEDLIQQQISNDTVSPR/ASASYYEQYHSLNEIYSWIEFITERHPDMLTKIH |
| | | IGSSFEKYPLYVLKVSGKEQAAKNAIWIDCGIHAREWISPAFCLWFIGHIT |
| | | QFYGIIGQYTNLLRLVDFYVMPVVNVDGYDYSWKKNRMWRKNRSFYA |
| | | NNHCIGTDLNRNFASKHWCEEGASSSSCSETYCGLYPESEPEVKAVASFL |
| | | RRNINQIKAYISMHSYSQHIVFPYSYTRSKSKDHEELSLVASEAVRAIEKIS |
| | | KNTRYTHGHGSETLYLAPGGGDDWIYDLGIKYSFTIELRDTGTYGFLLPE |
| | | RYIKPTCREAFAAVSKIAWHVIRNV (SEQ ID NO: 2) |
| | Exemplary CPN1 | MKLCSLAVLVPIVLFCEQHVFAFQSGQVLAALPRTSRQVQVLQNLTTTY |
| | construct | EIVLWQPVTADLIVKKKQVHFFVNASDVDNVKAHLNVSGIPCSVLLADV |
| | comprising a | EDLIQQQISNDTVSPR/ASASYYVTFRHHRYDDLVRTLYKVQNECPGITR |
| | CPB2 sequence | VYSIGRSVEGRHLYVLEFSDHPGIHEPLEPEVKYVGNMHGNEALGRELM |
| | | LQLSEFLCEEFRNRNQRIVQLIQDTRIHILPSMNPDGYEVAAAQGPNKPG |
| | | YLVGRNNANGVDLNRNFPDLNTYIYYNEKYGGPNHHLPLPDNWKSQVE |
| | | PETRAVIRWMHSFNFVLSANLHGGAVVANYPYDKSFEHRVRGVR/RTAS |
| | | TPTPDDKLFQKLAKVYSYAHGWMFQGWNCGDYFPDGITNGASWYSLS |
| | | KGMQDFNYLHTNCFEITLELSCDKFPPEEELQREWLGNREALIQFLEQVH |
| | | QGIKGMVLDENYNNLANAVIS (SEQ ID NO: 3) |
| TT | transthyretin | GIKGMVLDENYNNLANAVISVSGINHDVTSGDHGDYFRLLLPGIYTVSA |
| | domain | TAPGYDPETVTVTVGPAEPTLVNFHLKRS (SEQ ID NO: 16) |
| HSA | Human serum | DAHKSEVAHRFKDLGEENFKALVLIAFAQYLQQCPFEDHVKLVNEVTEF |
| | albumin | AKTCVADESAENCDKSLHTLFGDKLCTVATLRETYGEMADCCAKQEPE |
| | | RNECFLQHKDDNPNLPRLVRPEVDVMCTAFHDNEETFLKKYLYEIARRH |
| | | PYFYAPELLFFAKRYKAAFTECCQAADKAACLLPKLDELRDEGKASSAK |
| | | QRLKCASLQKFGERAFKAWAVARLSQRFPKAEFAEVSKLVTDLTKVHT |
| | | ECCHGDLLECADDRADLAKYICENQDSISSKLKECCEKPLLEKSHCIAEV |
| | | ENDEMPADLPSLAADFVESKDVCKNYAEAKDVFLGMFLYEYARRHPDY |
| | | SVVLLLRLAKTYETTLEKCCAAADPHECYAKVFDEFKPLVEEPQNLIKQ |
| | | NCELFEQLGEYKFQNALLVRYTKKVPQVSTPTLVEVSRNLGKVGSKCCK |
| | | HPEAKRMPCAEDYLSVVLNQLCVLHEKTPVSDRVTKCCTESLVNRRPCF |
| | | SALEVDETYVPKEFNAETFTFHADICTLSEKERQIKKQTALVELVKHKPK |
| | | ATKEQLKAVMDDFAAFVEKCCKADDKETCFAEEGKKLVAASQAALGL |
| | | (SEQ ID NO: 17) |
| signal HSA | signal sequence of | MKWVTFISLLFLFSSAYS (SEQ ID NO: 18) |
| | HSA | |
| signal | signal sequence of | MTRLTVLALLAGLLASSRA (SEQ ID NO: 19) |
| Azurocidin | Azurocidin | |
| signal IL2 | signal sequence of | MYRMQLLSCIALSLALVTNS (SEQ ID NO: 20) |
| | interleukin 2 | |
| signal Ig | signal sequence of | MGWSLILLFLVAVATRVHS (SEQ ID NO: 21) |
| | immunoglobin G | |
| Activation | Activation peptide | FQSGQVLAALPRTSRQVQVLQNLTTTYEIVLWQPVTADLIVKKKQVHFF |
| peptide | of CBP2, the N- | VNASDVDNVKAHLNVSGIPCSVLLADVEDLIQQQISNDTVSPRASAS |
| | terminal 96aa of | (SEQ ID NO: 22) |
| | CBP2 protease | |
| 10His-Sumo | 10 Histidine | GHHHHHHHHHHSLQDSEVNQEAKPEVKPEVKPETHINLKVSDGSSEIFF |
| | residues followed | KIKKTTPLRRLMEAFAKRQGKEMDSLTFLYDGIEIQADQTPEDLDMEDN |
| | by SUMO | DIIEAHREQIGG (SEQ ID NO: 23) |
| SUMO | Small Ubiquitin | SLQDSEVNQEAKPEVKPEVKPETHINLKVSDGSSEIFFKIKKTTPLRRLME |
| | Modifying | AFAKRQGKEMDSLTFLYDGIEIQADQTPEDLDMEDNDIIEAHREQIGG |
| | enzyme | (SEQ ID NO: 24) |
| TEV | Tobacco Etch | ENLYFQG (SEQ ID NO: 25) |
| | Virus protease | |
| | cleavage site | |
| LL | Long Linker | GSSGGSSGGSSGGSSGGSSG (SEQ ID NO: 26) |
| | (20amino acid- | |
| | length version of | |
| | GS linker) | |
| Fc | The fragment | THTCPPCPAPEAAGGPSVFLFPPKPKDTLMISRTPEVTCVVVDVSHEDPE |
| | crystallizable | VKFNWYVDGVEVHNAKTKPREEQYNSTYRVVSVLTVLHQDWLNGKEY |
| | region (Fc region) | KCKVSNKALGAPIEKTISKAKGQPREPQVYTLPPSRDELTKNQVSLTCLV |
| | is the tail region | KGFYPSDIAVEWESNGQPENNYKTTPPVLDSDGSFFLYSKLTVDKSRWQ |
| | of an antibody | QGNVFSCSVMHEALHNHYTQKSLSLSPGK (SEQ ID NO: 27) |
| | that interacts with | |
| | cell surface | |
| | receptors called | |
| | Fc receptors and | |
| | some proteins of | |
| | the complement | |
| | system. | |
| (no 1st DK | mutations | THTCPPCPAPEAAGGPSVFLFPPKPKDTLMISRTPEVTCVVVDVSHEDPE |
| LALA-PG) | introduced in the | VKFNWYVDGVEVHNAKTKPREEQYNSTYRVVSVLTVLHQDWLNGKEY |
| | Fc region | KCKVSNKALGAPIEKTISKAKGQPREPQVYTLPPSRDELTKNQVSLTCLV |
| | | KGFYPSDIAVEWESNGQPENNYKTTPPVLDSDGSFFLYSKLTVDKSRWQ |
| | | QGNVFSCSVMHEALHNHYTQKSLSLSPGK (SEQ ID NO: 28) |
| Xa | Factor Xa | AEGR (SEQ ID NO: 29) |
| | protease cleavage | |
| | site | |
| mMBP | mammalian | KTEEGKLVIWINGDKGYNGLAEVGKKFEKDTGIKVTVEHPDKLEEKFPQ |
| | maltose binding | VAATGDGPDIIFWAHDRFGGYAQSGLLAEITPAAAFQDKLYPFTWDAVR |
| | protein | YNGKLIAYPIAVEALSLIYNKDLLPNPPKTWEEIPALDKELKAKGKSALM |
| | | FNLQEPYFTWPLIAADGGYAFKYAAGKYDIKDVGVDNAGAKAGLTFLV |
| | | DLIKNKHMNADTDYSIAEHAFNHGETAMTINGPWAWSNIDTSAVNYGV |
| | | TVLPTFKGQPSKPFVGVLSAGINAASPNKELAKEFLENYLLTDEGLEAVN |
| | | KDKPLGAVALKSYEEELVKDPRVAATMENAQKGEIMPNIPQMSAFWYA |
| | | VRTAVINAASGRQTVDAAL (SEQ ID NO: 30) |
| GST | Glutathione S | MSPILGYWKIKGLVQPTRLLLEYLEEKYEEHLYERDEGDKWRNKKFELG |
| | transferase | LEFPNLPYYIDGDVKLTQSMAIIRYIADKHNMLGGCPKERAEISMLEGAV |
| | | LDIRYGVSRIAYSKDFETLKVDFLSKLPEMLKMFEDRLCHKTYLNGDHV |
| | | THPDFMLYDALDVVLYMDPMCLDAFPKLVCFKKRIEAIPQIDKYLKSSK |
| | | YIAWPLQGWQATFGGGDHPPK (SEQ ID NO: 31) |

TABLE 2
Exemplary Fusion Constructs

| Const. | N2 | N2 | N | NLink- | | | | C2Link- | |
|---|---|---|---|---|---|---|---|---|---|
| No. | Term | Linker | Term | er | Core | CLinker | CTerm | er | C2Term |
| 1 | | | | | hCPN1 | | | | |
| | | | | | (1-398) | | | | |
| 2 | | | | | hCPN1 | | | | |
| | | | | | (1-398) | | | | |
| 3 | | | | | hCPN1 | | | | |
| | | | | | (1-398) | | | | |
| 4 | | | | | hCPN1 | | | | |
| | | | | | (1-398) | | | | |
| 5 | | | | | hCPN1 | | HHHHHH | | |
| | | | | | (1-398) | | (SEQ | | |
| | | | | | | | ID | | |
| | | | | | | | NO: | | |
| | | | | | | | 32) | | |
| 6 | | | | | hCPN1 | | | GSSGG | HSA |
| | | | | | (1-398) | | | SSGGS | |
| | | | | | | | | SG | |
| | | | | | | | | (SEQ | |
| | | | | | | | | ID | |
| | | | | | | | | NO: | |
| | | | | | | | | 33) | |
| 7 | | | | | hCPN1 | GSSG | hCPN2 | | |
| | | | | | (1-398) | GSSG | (1-339) | | |
| | | | | | | GSSG | | | |
| | | | | | | (SEQ | | | |
| | | | | | | ID | | | |
| | | | | | | NO: | | | |
| | | | | | | 33) | | | |
| 8 | | | | | hCPN1 | GSSG | hCPN2 | | HHHH |
| | | | | | (1-398) | GSSG | (1-339) | | HH |
| | | | | | | GSSG | | | (SEQ |
| | | | | | | (SEQ | | | ID |
| | | | | | | ID | | | NO: |
| | | | | | | NO: | | | 32) |
| | | | | | | 33) | | | |
| 9 | | | CPB2- | | hCPN1 | | | | |
| | | | Activa- | | (1-398) | | | | |
| | | | tion | | | | | | |
| | | | peptide | | | | | | |
| 10 | | | CPB2- | | hCPN1 | | HHHH | | |
| | | | Activa- | | (1-398) | | HH | | |
| | | | tion | | | | (SEQ | | |
| | | | peptide | | | | ID | | |
| | | | | | | | NO: | | |
| | | | | | | | 32) | | |
| 11 | | | CPB2- | | hCPN1 | GSSG | HSA | | |
| | | | Activa- | | (1-398) | GSSG | | | |
| | | | tion | | | GSSG | | | |
| | | | peptide | | | (SEQ | | | |
| | | | | | | ID | | | |
| | | | | | | NO: | | | |
| | | | | | | 33) | | | |
| 12 | | | CPB2- | | hCPN1 | GSSG | hCPN2 | | |
| | | | Activa- | | (1-398) | GSSG | (1-339) | | |
| | | | tion | | | GSSG | | | |
| | | | peptide | | | (SEQ | | | |
| | | | | | | ID | | | |
| | | | | | | NO: | | | |
| | | | | | | 33) | | | |
| 13 | | | CPB2- | | hCPN1 | GSSG | hCPN2 | | HHHH |
| | | | Activa- | | (1-398) | GSSG | (1-339) | | HH |
| | | | tion | | | GSSG | | | (SEQ |
| | | | peptide | | | (SEQ | | | ID |
| | | | | | | ID | | | NO: |
| | | | | | | NO: | | | 32) |
| | | | | | | 33) | | | |
| 14 | GHHH | G | SUMO | | hCPN1 | | | | |
| | HHHH | | | | (1-398) | | | | |
| | HHH | | | | | | | | |
| | (SEQ | | | | | | | | |
| | ID | | | | | | | | |
| | NO: | | | | | | | | |
| | 34) | | | | | | | | |
| 15 | GHHH | G | SUMO | | hCPN1 | GSSG | HSA | | |
| | HHHH | | | | (1-398) | GSSG | | | |
| | HHH | | | | | GSSG | | | |
| | (SEQ | | | | | (SEQ | | | |
| | ID | | | | | ID | | | |
| | NO: | | | | | NO: | | | |
| | 34) | | | | | 33) | | | |
| 16 | GHHH | G | SUMO | | hCPN1 | | | | |
| | HHHH | | | | (1-320); | | | | |
| | HHH | | | | A | | | | |
| | (SEQ | | | | (321-398) | | | | |
| | ID | | | | | | | | |
| | NO: | | | | | | | | |
| | 34) | | | | | | | | |
| 17 | GHHH | G | SUMO | | hCPN1 | GSSG | HSA | | |
| | HHHH | | | | (1-320); | GSSG | | | |
| | HHH | | | | A | GSSG | | | |
| | (SEQ | | | | (321-398) | (SEQ | | | |
| | ID | | | | | ID | | | |
| | NO: | | | | | NO: | | | |
| | 34) | | | | | 33) | | | |
| 18 | | | | | hCPN1 | | | | |
| | | | | | (1-320); | | | | |
| | | | | | A | | | | |
| | | | | | (321-398) | | | | |
| 19 | | | | | hCPN1 | GSSG | HSA | | |
| | | | | | (1-320); | GSSG | | | |
| | | | | | A | GSSG | | | |
| | | | | | (321-398) | (SEQ | | | |
| | | | | | | ID | | | |
| | | | | | | NO: | | | |
| | | | | | | 33) | | | |
| 20 | | | | | hCPN1 | | TEV | GSSG | HSA |
| | | | | | (1-398) | | | GSSG | |
| | | | | | | | | GSSG | |
| | | | | | | | | (SEQ | |
| | | | | | | | | ID | |
| | | | | | | | | NO: | |
| | | | | | | | | 33) | |
| 21 | | | | | hCPN1 | | TEV | GSSG | HSA |
| | | | | | (1-398) | | | GSSG | |
| | | | | | | | | GSSG | |
| | | | | | | | | GSSG | |
| | | | | | | | | GSSG | |
| | | | | | | | | (SEQ | |
| | | | | | | | | ID | |
| | | | | | | | | NO: | |
| | | | | | | | | 33) | |
| 22 | | | | | hCPN1 | | TEV | GSSG | Fc |
| | | | | | (1-398) | | | GSSG | (no 1st |
| | | | | | | | | GSSG | DKLA |
| | | | | | | | | (SEQ | LA-PG) |
| | | | | | | | | ID | |
| | | | | | | | | NO: | |
| | | | | | | | | 33) | |
| 23 | | | | | hCPN1 | | Xa | GSSG | Fc |
| | | | | | (1-398); | | | GSSG | (no 1st |
| | | | | | R37G | | | GSSG | DKLA |
| | | | | | | | | (SEQ | LA-PG) |
| | | | | | | | | ID | |
| | | | | | | | | NO: | |
| | | | | | | | | 33) | |
| 24 | | | | | hCPN1 | | Xa | GSSG | HSA |
| | | | | | (1-398); | | | GSSG | |
| | | | | | R37G | | | GSSG | |
| | | | | | | | | (SEQ | |
| | | | | | | | | ID | |
| | | | | | | | | NO: | |
| | | | | | | | | 33) | |
| 25 | mMBP | AAAQ | TEV | | hCPN1 | GSSG | HSA | | |
| | | TNAA | | | (1-398) | GSSG | | | |
| | | AASS | | | | GSSG | | | |
| | | ASLE | | | | (SEQ | | | |
| | | (SEQ | | | | ID | | | |
| | | ID | | | | NO: | | | |
| | | NO: | | | | 33) | | | |
| | | 35) | | | | | | | |
| 26 | mMBP | AAAQ | TEV | | hCPN1 | | | | |
| | | TNAA | | | (1-398) | | | | |
| | | AASS | | | | | | | |
| | | ASLE | | | | | | | |
| | | (SEQ | | | | | | | |
| | | ID | | | | | | | |
| | | NO: | | | | | | | |
| | | 35) | | | | | | | |
| 27 | GST | AAAQ | TEV | | hCPN1 | GSSG | HSA | | |
| | | TNAA | | | (1-398) | GSSG | | | |
| | | AASS | | | | GSSG | | | |
| | | ASLE | | | | (SEQ | | | |
| | | (SEQ | | | | ID | | | |
| | | ID | | | | NO: | | | |
| | | NO: | | | | 33) | | | |
| | | 35) | | | | | | | |
| 28 | | | | | hCPN1 | GSSG | hCPN2 | | |
| | | | | | (1-398) | GSSG | (1-456) | | |
| | | | | | | GSSG | | | |
| | | | | | | GSSG | | | |
| | | | | | | GSSG | | | |
| | | | | | | (SEQ | | | |
| | | | | | | ID | | | |
| | | | | | | NO: | | | |
| | | | | | | 26) | | | |
| 29 | | | | | hCPN2 | | | | |
| | | | | | (1-456) | | | | |
| 30 | | | | | hCPN2 | | | | |
| | | | | | (1-524) | | | | |
| 31 | | | | | hCPN1 | | | | |
| | | | | | (1-320); | | | | |
| | | | | | L55N; | | | | |
| | | | | | H161R; | | | | |
| | | | | | N188D; | | | | |
| | | | | | V190K; | | | | |
| | | | | | K229E; | | | | |
| | | | | | L230W; | | | | |
| | | | | | N281D; | | | | |
| | | | | | C282S; | | | | |
| | | | | | F283Y; | | | | |
| | | | | | R308K; | | | | |
| | | | | | Q320N | | | | |
| 32 | | | | | hCPN1 | | | | |
| | | | | | (1-320); | | | | |
| | | | | | L55N; | | | | |
| | | | | | H161S; | | | | |
| | | | | | N188D; | | | | |
| | | | | | V190R; | | | | |
| | | | | | K229E; | | | | |
| | | | | | L230W; | | | | |
| | | | | | C282S; | | | | |
| | | | | | F283Y; | | | | |
| | | | | | R308K; | | | | |
| | | | | | Q320N | | | | |
| 33 | | | | | hCPN1 | | | | |
| | | | | | (1-320); | | | | |
| | | | | | L55N; | | | | |
| | | | | | H161K; | | | | |
| | | | | | N188D; | | | | |
| | | | | | V190K; | | | | |
| | | | | | K229E; | | | | |
| | | | | | L230W; | | | | |
| | | | | | C282S; | | | | |
| | | | | | F283Y; | | | | |
| | | | | | R308K; | | | | |
| | | | | | Q320N | | | | |
| 34 | | | | | hCPN1 | | | | |
| | | | | | (1-320); | | | | |
| | | | | | L55N; | | | | |
| | | | | | H161S; | | | | |
| | | | | | N188D; | | | | |
| | | | | | V190R; | | | | |
| | | | | | K229E; | | | | |
| | | | | | L230K; | | | | |
| | | | | | K233D; | | | | |
| | | | | | C282S; | | | | |
| | | | | | F283Y; | | | | |
| | | | | | R308K; | | | | |
| | | | | | Q320K | | | | |
| 35 | | | | | hCPN1 | | | | |
| | | | | | (1-320); | | | | |
| | | | | | L55N; | | | | |
| | | | | | H161R; | | | | |
| | | | | | N188D; | | | | |
| | | | | | V190K; | | | | |
| | | | | | K229E; | | | | |
| | | | | | L230W; | | | | |
| | | | | | K233H; | | | | |
| | | | | | N281D; | | | | |
| | | | | | C282S; | | | | |
| | | | | | F283Y; | | | | |
| | | | | | R308K; | | | | |
| | | | | | Q320N | | | | |
| 36 | | | | | hCPN1 | | | | |
| | | | | | (1-320); | | | | |
| | | | | | L55N; | | | | |
| | | | | | H161R; | | | | |
| | | | | | N188D; | | | | |
| | | | | | V190K; | | | | |
| | | | | | K229E; | | | | |
| | | | | | L230K; | | | | |
| | | | | | N281D; | | | | |
| | | | | | C282S; | | | | |
| | | | | | F283Y; | | | | |
| | | | | | R308K; | | | | |
| | | | | | Q320N | | | | |
| 37 | | | | | hCPN1 | | | | |
| | | | | | (1-438) | | | | |
| 38 | | | | | hCPN1 | GSSG | HSA | | |
| | | | | | (1-438) | GSSG | | | |
| | | | | | | GSSG | | | |
| | | | | | | (SEQ | | | |
| | | | | | | ID | | | |
| | | | | | | NO: | | | |
| | | | | | | 33) | | | |
| 39 | | | | | hCPN1 | GSSG | CPN2 | | |
| | | | | | (1-438) | GSSG | (1-456) | | |
| | | | | | | GSSG | | | |
| | | | | | | GSSG | | | |
| | | | | | | GSSG | | | |
| | | | | | | (SEQ | | | |
| | | | | | | ID | | | |
| | | | | | | NO: | | | |
| | | | | | | 26) | | | |
| 40 | | | | | hCPN1 | GSSG | CPN2 | | |
| | | | | | (1-438) | GSSG | (1-524) | | |
| | | | | | | GSSG | | | |
| | | | | | | GSSG | | | |
| | | | | | | GSSG | | | |
| | | | | | | (SEQ | | | |
| | | | | | | ID | | | |
| | | | | | | NO: | | | |
| | | | | | | 26) | | | |
| 41 | | | | | hCPN1 | GGSS | CPN2 | | |
| | | | | | (1-397) | GGSS | (1-425) | | |
| | | | | | | GGSS | | | |
| | | | | | | GGSS | | | |
| | | | | | | GGSS | | | |
| | | | | | | GGSS | | | |
| | | | | | | GGSS | | | |
| | | | | | | GGS | | | |
| | | | | | | (SEQ | | | |
| | | | | | | ID | | | |
| | | | | | | NO: | | | |
| | | | | | | 36) | | | |
| 42 | | | | | hCPN1 | GGSS | CPN2 | | CD180 |
| | | | | | (1-397) | GGSS | (1-370) | | (45 |
| | | | | | | GGSS | | | residue |
| | | | | | | GGSS | | | capping |
| | | | | | | GGSS | | | motif) |
| | | | | | | GGSS | | | |
| | | | | | | GGSS | | | |
| | | | | | | GGS | | | |
| | | | | | | (SEQ | | | |
| | | | | | | ID | | | |
| | | | | | | NO: | | | |
| | | | | | | 36) | | | |
| 43 | | | | | hCPN1 | GGSS | CPN2 | | LRIG1 |
| | | | | | (1-397) | GGSS | (1-367) | | (59 |
| | | | | | | GGSS | | | residue |
| | | | | | | GGSS | | | capping |
| | | | | | | GGSS | | | motif) |
| | | | | | | GGSS | | | |
| | | | | | | GGSS | | | |
| | | | | | | GGS | | | |
| | | | | | | (SEQ | | | |
| | | | | | | ID | | | |
| | | | | | | NO: | | | |
| | | | | | | 36) | | | |
| 44 | | | | | hCPN1 | GGSS | CPN2 | | |
| | | | | | (1-396) | GGSS | (1-425) | | |
| | | | | | | GGSS | | | |
| | | | | | | GGSS | | | |
| | | | | | | GGSS | | | |
| | | | | | | GGSS | | | |
| | | | | | | GGSS | | | |
| | | | | | | GGS | | | |
| | | | | | | (SEQ | | | |
| | | | | | | ID | | | |
| | | | | | | NO: | | | |
| | | | | | | 36) | | | |
| 45 | | | | | hCPN1 | GGSS | CPN2 | | CD180 |
| | | | | | (1-396) | GGSS | (1-425) | | (45 |
| | | | | | | GGSS | | | residue |
| | | | | | | GGSS | | | capping |
| | | | | | | GGSS | | | motif) |
| | | | | | | GGSS | | | |
| | | | | | | GGSS | | | |
| | | | | | | GGS | | | |
| | | | | | | (SEQ | | | |
| | | | | | | ID | | | |
| | | | | | | NO: | | | |
| | | | | | | 36) | | | |
| 46 | | | | | hCPN1 | GGSS | CPN2 | | LRIG1 |
| | | | | | (1-396) | GGSS | (1-425) | | (59 |
| | | | | | | GGSS | | | residue |
| | | | | | | GGSS | | | capping |
| | | | | | | GGSS | | | motif) |
| | | | | | | GGSS | | | |
| | | | | | | GGSS | | | |
| | | | | | | GGS | | | |
| | | | | | | (SEQ | | | |
| | | | | | | ID | | | |
| | | | | | | NO: | | | |
| | | | | | | 36) | | | |
| 47 | | | | | hCPN1 | GGSS | CPN2 | | |
| | | | | | (1-397) | GGSS | (1-425) | | |
| | | | | | | GGSS | | | |
| | | | | | | GGSS | | | |
| | | | | | | GGSS | | | |
| | | | | | | GGSS | | | |
| | | | | | | GG | | | |
| | | | | | | (SEQ | | | |
| | | | | | | ID | | | |
| | | | | | | NO: | | | |
| | | | | | | 37) | | | |
| 48 | | | | | hCPN1 | GGSS | CPN2 | | |
| | | | | | (1-397) | GGSS | (1-425) | | |
| | | | | | | GGSS | | | |
| | | | | | | GGSS | | | |
| | | | | | | GG | | | |
| | | | | | | SSGG | | | |
| | | | | | | SSGG | | | |
| | | | | | | SSGG | | | |
| | | | | | | SSGG | | | |
| | | | | | | SSSS | | | |
| | | | | | | GG | | | |
| | | | | | | (SEQ | | | |
| | | | | | | ID | | | |
| | | | | | | NO: | | | |
| | | | | | | 38) | | | |
| 49 | | | | | hCPN1 | GGSS | CPN2 | | CD180 |
| | | | | | (1-396) | GGSS | (1-370) | | (45 |
| | | | | | | GGSS | | | residue |
| | | | | | | GGSS | | | capping |
| | | | | | | GGSS | | | motif) |
| | | | | | | GGSS | | | |
| | | | | | | GG | | | |
| | | | | | | (SEQ | | | |
| | | | | | | ID | | | |
| | | | | | | NO: | | | |
| | | | | | | 37) | | | |
| 50 | | | | | hCPN1 | GGSS | CPN2 | | CD180 |
| | | | | | (1-396) | GGSS | (1-370) | | (45 |
| | | | | | | GGSS | | | residue |
| | | | | | | GGSS | | | capping |
| | | | | | | GGSS | | | motif) |
| | | | | | | GGSS | | | |
| | | | | | | GGSS | | | |
| | | | | | | GGSS | | | |
| | | | | | | GGSS | | | |
| | | | | | | SSGG | | | |
| | | | | | | (SEQ | | | |
| | | | | | | ID | | | |
| | | | | | | NO: | | | |
| | | | | | | 38) | | | |
| 51 | GHHH | G | SUMO | | hCPN1 | GGSS | CPN2 | | |
| | HHHH | | | | (1-397) | GGSS | (1-425) | | |
| | HHH | | | | | GGSS | | | |
| | (SEQ | | | | | GGSS | | | |
| | ID | | | | | GGSS | | | |
| | NO: | | | | | GGSS | | | |
| | 34) | | | | | GGSS | | | |
| | | | | | | GGS | | | |
| | | | | | | (SEQ | | | |
| | | | | | | ID | | | |
| | | | | | | NO: | | | |
| | | | | | | 36) | | | |
| 52 | GHHH | G | SUMO | | hCPN1 | GGSS | CPN2 | | CD180 |
| | HHHH | | | | (1-397) | GGSS | (1-370) | | (45 |
| | HHH | | | | | GGSS | | | residue |
| | (SEQ | | | | | GGSS | | | capping |
| | ID | | | | | GGSS | | | motif) |
| | NO: | | | | | GGSS | | | |
| | 34) | | | | | GGSS | | | |
| | | | | | | GGS | | | |
| | | | | | | (SEQ | | | |
| | | | | | | ID | | | |
| | | | | | | NO: | | | |
| | | | | | | 36) | | | |
| 53 | GHHH | G | SUMO | | hCPN1 | GGSS | CPN2 | | LRIG1 |
| | HHHH | | | | (1-397) | GGSS | (1-367) | | (59 |
| | HHH | | | | | GGSS | | | residue |
| | (SEQ | | | | | GGSS | | | capping |
| | ID | | | | | GGSS | | | motif) |
| | NO: | | | | | GGSS | | | |
| | 34) | | | | | GGSS | | | |
| | | | | | | GGS | | | |
| | | | | | | (SEQ | | | |
| | | | | | | ID | | | |
| | | | | | | NO: | | | |
| | | | | | | 36) | | | |
| 54 | GHHH | G | SUMO | | hCPN1 | GGSS | CPN2 | | |
| | HHHH | | | | (1-396) | GGSS | (1-425) | | |
| | HHH | | | | | GGSS | | | |
| | (SEQ | | | | | GGSS | | | |
| | ID | | | | | GGSS | | | |
| | NO: | | | | | GGSS | | | |
| | 34) | | | | | GGSS | | | |
| | | | | | | GGS | | | |
| | | | | | | (SEQ | | | |
| | | | | | | ID | | | |
| | | | | | | NO: | | | |
| | | | | | | 36) | | | |
| 55 | GHHH | G | SUMO | | hCPN1 | GGSS | CPN2 | | CD180 |
| | HHHH | | | | (1-396) | GGSS | (1-425) | | (45 |
| | HHH | | | | | GGSS | | | residue |
| | (SEQ | | | | | GGSS | | | capping |
| | ID | | | | | GGSS | | | motif) |
| | NO: | | | | | GGSS | | | |
| | 34) | | | | | GGSS | | | |
| | | | | | | GGS | | | |
| | | | | | | (SEQ | | | |
| | | | | | | ID | | | |
| | | | | | | NO: | | | |
| | | | | | | 36) | | | |
| 56 | GHHH | G | SUMO | | hCPN1 | GGSS | CPN2 | | LRIG |
| | HHHH | | | | (1-396) | GGSS | (1-425) | | 1 |
| | HHH | | | | | GGSS | | | (59 |
| | (SEQ | | | | | GGSS | | | residue |
| | ID | | | | | GGSS | | | capping |
| | NO: | | | | | GGSS | | | motif) |
| | 34) | | | | | GGSS | | | |
| | | | | | | GGS | | | |
| | | | | | | (SEQ | | | |
| | | | | | | ID | | | |
| | | | | | | NO: | | | |
| | | | | | | 36) | | | |
| 57 | GHHH | G | SUMO | | hCPN1 | GGSS | CPN2 | | |
| | HHHH | | | | (1-397) | GGSS | (1-425) | | |
| | HHH | | | | | GGSS | | | |
| | (SEQ | | | | | GGSS | | | |
| | ID | | | | | GGSS | | | |
| | NO: | | | | | GGSS | | | |
| | 34) | | | | | GG | | | |
| | | | | | | (SEQ | | | |
| | | | | | | ID | | | |
| | | | | | | NO: | | | |
| | | | | | | 37) | | | |
| 58 | GHHH | G | SUMO | | hCPN1 | GGSS | CPN2 | | |
| | HHHH | | | | (1-397) | GGSS | (1-425) | | |
| | HHH | | | | | GGSS | | | |
| | (SEQ | | | | | GGSS | | | |
| | ID | | | | | GGSS | | | |
| | NO: | | | | | GGSS | | | |
| | 34) | | | | | GGSS | | | |
| | | | | | | GGSS | | | |
| | | | | | | GGSS | | | |
| | | | | | | SSGG | | | |
| | | | | | | (SEQ | | | |
| | | | | | | ID | | | |
| | | | | | | NO: | | | |
| | | | | | | 38) | | | |
| 59 | GHHH | G | SUMO | | hCPN1 | GGSS | CPN2 | | CD180 |
| | HHHH | | | | (1-396) | GGSS | (1-370) | | (45 |
| | HHH | | | | | GGSS | | | residue |
| | (SEQ | | | | | GGSS | | | capping |
| | ID | | | | | GGSS | | | motif) |
| | NO: | | | | | GGSS | | | |
| | 34) | | | | | GG | | | |
| | | | | | | (SEQ | | | |
| | | | | | | ID | | | |
| | | | | | | NO: | | | |
| | | | | | | 37) | | | |
| 60 | GHHH | G | SUMO | | hCPN1 | GGSS | CPN2 | | CD180 |
| | HHHH | | | | (1-396) | GGSS | (1-370) | | (45 |
| | HHH | | | | | GGSS | | | residue |
| | (SEQ | | | | | GGSS | | | capping |
| | ID | | | | | GGSS | | | motif) |
| | NO: | | | | | GGSS | | | |
| | 34) | | | | | GGSS | | | |
| | | | | | | GGSS | | | |
| | | | | | | GGSS | | | |
| | | | | | | SSGG | | | |
| | | | | | | (SEQ | | | |
| | | | | | | ID | | | |
| | | | | | | NO: | | | |
| | | | | | | 38) | | | |
| 61 | | | | | hCPN1 | | | GSSG | HSA |
| | | | | | (1-398); | | | GSSG | |
| | | | | | K60F; | | | GSSG | |
| | | | | | V62S; | | | (SEQ | |
| | | | | | V180Y; | | | ID | |
| | | | | | S192A; | | | NO: | |
| | | | | | N276T; | | | 33) | |
| | | | | | E284I | | | | |
| 62 | | | | | hCPN1 | | | GSSG | HSA |
| | | | | | (1-398); | | | GSSG | |
| | | | | | K60F; | | | GSSG | |
| | | | | | V180F; | | | (SEQ | |
| | | | | | S192A; | | | ID | |
| | | | | | N276V; | | | NO: | |
| | | | | | E284I | | | 33) | |
| 63 | | | | | hCPN1 | | | GSSG | HSA |
| | | | | | (1-398); | | | GSSG | |
| | | | | | K60F; | | | GSSG | |
| | | | | | V62M; | | | (SEQ | |
| | | | | | V180A; | | | ID | |
| | | | | | S192A; | | | NO: | |
| | | | | | M272F; | | | 33) | |
| | | | | | N276V; | | | | |
| | | | | | E284I | | | | |
| 64 | | | | | hCPN1 | | | GSSG | HSA |
| | | | | | (1-398); | | | GSSG | |
| | | | | | K60A; | | | GSSG | |
| | | | | | V62L; | | | (SEQ | |
| | | | | | M184L; | | | ID | |
| | | | | | S192M; | | | NO: | |
| | | | | | M272L; | | | 33) | |
| | | | | | N276I; | | | | |
| | | | | | E284V | | | | |
| 65 | | | | | hCPN1 | | | GSSG | HSA |
| | | | | | (1-398); | | | GSSG | |
| | | | | | A193W; | | | GSSG | |
| | | | | | A202V; | | | (SEQ | |
| | | | | | Y238F; | | | ID | |
| | | | | | I285L; | | | NO: | |
| | | | | | L287I; | | | 33) | |
| | | | | | L289Y; | | | | |
| | | | | | E314A | | | | |
| 66 | | | | | hCPN1 | | | GSSG | HSA |
| | | | | | (1-398); | | | GSSG | |
| | | | | | A202V; | | | GSSG | |
| | | | | | L287I; | | | (SEQ | |
| | | | | | L289T | | | ID | |
| | | | | | | | | NO: | |
| | | | | | | | | 33) | |
| 67 | | | | | hCPN1 | | | GSSG | HSA |
| | | | | | (1-398); | | | GSSG | |
| | | | | | A202I | | | GSSG | |
| | | | | | | | | (SEQ | |
| | | | | | | | | ID | |
| | | | | | | | | NO: | |
| | | | | | | | | 33) | |
| 68 | | | | | hCPN1 | | | GSSG | HSA |
| | | | | | (1-398); | | | GSSG | |
| | | | | | A235L | | | GSSG | |
| | | | | | | | | (SEQ | |
| | | | | | | | | ID | |
| | | | | | | | | NO: | |
| | | | | | | | | 33) | |
| 69 | | | | | hCPN1 | | | GSSG | HSA |
| | | | | | (1-398); | | | GSSG | |
| | | | | | V1I; | | | GSSG | |
| | | | | | F3W; | | | (SEQ | |
| | | | | | E74L; | | | ID | |
| | | | | | Q78W | | | NO: | |
| | | | | | | | | 33) | |
| 70 | | | | | hCPN1 | | | GSSG | HSA |
| | | | | | (1-398); | | | GSSG | |
| | | | | | V1I; | | | GSSG | |
| | | | | | E74L; | | | (SEQ | |
| | | | | | Q78W | | | ID | |
| | | | | | | | | NO: | |
| | | | | | | | | 33) | |
| 71 | | | | | hCPN1 | GSSG | HSA | | |
| | | | | | (1-398); | GSSG | | | |
| | | | | | K60F; | GSSG | | | |
| | | | | | V62S; | (SEQ | | | |
| | | | | | V180Y; | ID | | | |
| | | | | | S192A; | NO: | | | |
| | | | | | N276T; | 33) | | | |
| | | | | | E284I | | | | |
| 72 | | | | | hCPN1 | GSSG | HSA | | |
| | | | | | (1-398); | GSSG | | | |
| | | | | | K60F; | GSSG | | | |
| | | | | | V180F; | (SEQ | | | |
| | | | | | S192A; | ID | | | |
| | | | | | N276V; | NO: | | | |
| | | | | | E284I | 33) | | | |
| 73 | | | | | hCPN1 | GSSG | HSA | | |
| | | | | | (1-398); | GSSG | | | |
| | | | | | K60F; | GSSG | | | |
| | | | | | V62M; | (SEQ | | | |
| | | | | | V180A; | ID | | | |
| | | | | | S192A; | NO: | | | |
| | | | | | M272F; | 33) | | | |
| | | | | | N276V; | | | | |
| | | | | | E284I | | | | |
| 74 | | | | | hCPN1 | GSSG | HSA | | |
| | | | | | (1-398); | GSSG | | | |
| | | | | | K60A; | GSSG | | | |
| | | | | | V62L; | (SEQ | | | |
| | | | | | M184L; | ID | | | |
| | | | | | S192M; | NO: | | | |
| | | | | | M272L; | 33) | | | |
| | | | | | N2761; | | | | |
| | | | | | E284V | | | | |
| 75 | | | | | hCPN1 | GSSG | HSA | | |
| | | | | | (1-398); | GSSG | | | |
| | | | | | A193W; | GSSG | | | |
| | | | | | A202V; | (SEQ | | | |
| | | | | | Y238F; | ID | | | |
| | | | | | I285L; | NO: | | | |
| | | | | | L287I; | 33) | | | |
| | | | | | L289Y; | | | | |
| | | | | | E314A | | | | |
| 76 | | | | | hCPN1 | GSSG | HSA | | |
| | | | | | (1-398); | GSSG | | | |
| | | | | | A202V; | GSSG | | | |
| | | | | | L287I; | (SEQ | | | |
| | | | | | L289T | ID | | | |
| | | | | | | NO: | | | |
| | | | | | | 33) | | | |
| 77 | | | | | hCPN1 | GSSG | HSA | | |
| | | | | | (1-398); | GSSG | | | |
| | | | | | A202I | GSSG | | | |
| | | | | | | (SEQ | | | |
| | | | | | | ID | | | |
| | | | | | | NO: | | | |
| | | | | | | 33) | | | |
| 78 | | | | | hCPN1 | GSSG | HSA | | |
| | | | | | (1-398); | GSSG | | | |
| | | | | | A235L | GSSG | | | |
| | | | | | | (SEQ | | | |
| | | | | | | ID | | | |
| | | | | | | NO: | | | |
| | | | | | | 33) | | | |
| 79 | | | | | hCPN1 | GSSG | HSA | | |
| | | | | | (1-398); | GSSG | | | |
| | | | | | V1I; | GSSG | | | |
| | | | | | F3W; | (SEQ | | | |
| | | | | | E74L; | ID | | | |
| | | | | | Q78W | NO: | | | |
| | | | | | | 33) | | | |
| 80 | | | | | hCPN1 | GSSG | HSA | | |
| | | | | | (1-398); | GSSG | | | |
| | | | | | V1I; | GSSG | | | |
| | | | | | E74L; | (SEQ | | | |
| | | | | | Q78W | ID | | | |
| | | | | | | NO: | | | |
| | | | | | | 33) | | | |
| 81 | | | | | hCPN1 | GSSG | HSA | | |
| | | | | | (1-398); | GSSG | | | |
| | | | | | A70V | GSSG | | | |
| | | | | | | (SEQ | | | |
| | | | | | | ID | | | |
| | | | | | | NO: | | | |
| | | | | | | 33) | | | |
| 82 | | | | | hCPN1 | GSSG | HSA | | |
| | | | | | (1-398); | GSSG | | | |
| | | | | | N68D; | GSSG | | | |
| | | | | | P125S | (SEQ | | | |
| | | | | | | ID | | | |
| | | | | | | NO: | | | |
| | | | | | | 33) | | | |
| 83 | | | | | hCPN1 | GSSG | HSA | | |
| | | | | | (1-398); | GSSG | | | |
| | | | | | N68D; | GSSG | | | |
| | | | | | A70V; | (SEQ | | | |
| | | | | | P125S | ID | | | |
| | | | | | | NO: | | | |
| | | | | | | 33) | | | |
| 84 | | | | | hCPN1 | | TEV | GSSG | HSA |
| | | | | | (1-398); | | | GSSG | |
| | | | | | E288Q | | | GSSG | |
| | | | | | | | | (SEQ | |
| | | | | | | | | ID | |
| | | | | | | | | NO: | |
| | | | | | | | | 33) | |
| 85 | | | | | hCPN1 | | TEV | GSSG | HSA |
| | | | | | (1-398); | | | GSSG | |
| | | | | | Y266F | | | GSSG | |
| | | | | | | | | (SEQ | |
| | | | | | | | | ID | |
| | | | | | | | | NO: | |
| | | | | | | | | 33) | |
| 86 | | | | | hCPN1 | | TEV | GSSG | HSA |
| | | | | | (1-398); | | | GSSG | |
| | | | | | Y266F; | | | GSSG | |
| | | | | | E288Q | | | (SEQ | |
| | | | | | | | | ID | |
| | | | | | | | | NO: | |
| | | | | | | | | 33) | |
| 87 | | | | | hCPN1 | | TEV | GSSG | HSA |
| | | | | | (1-398); | | | GSSG | |
| | | | | | A199S | | | GSSG | |
| | | | | | | | | (SEQ | |
| | | | | | | | | ID | |
| | | | | | | | | NO: | |
| | | | | | | | | 33) | |
| 88 | | | | | hCPN1 | | TEV | GSSG | HSA |
| | | | | | (1-398); | | | GSSG | |
| | | | | | K124R; | | | GSSG | |
| | | | | | P125S | | | (SEQ | |
| | | | | | | | | ID | |
| | | | | | | | | NO: | |
| | | | | | | | | 33) | |
| 89 | | | | | hCPN1 | | TEV | GSSG | HSA |
| | | | | | (1-398); | | | GSSG | |
| | | | | | G121T; | | | GSSG | |
| | | | | | P122Y; | | | (SEQ | |
| | | | | | K124Q; | | | ID | |
| | | | | | P125D | | | NO: | |
| | | | | | | | | 33) | |
| 90 | | | | | hCPN1 | | TEV | GSSG | HSA |
| | | | | | (1-398); | | | GSSG | |
| | | | | | N123Y; | | | GSSG | |
| | | | | | K124R | | | (SEQ | |
| | | | | | | | | ID | |
| | | | | | | | | NO: | |
| | | | | | | | | 33) | |
| 91 | | | | | hCPN1 | | TEV | GSSG | HSA |
| | | | | | (1-398); | | | GSSG | |
| | | | | | G121D; | | | GSSG | |
| | | | | | P122D; | | | (SEQ | |
| | | | | | N123T; | | | ID | |
| | | | | | K124I | | | NO: | |
| | | | | | | | | 33) | |
| 92 | | | | | hCPN1 | | TEV | GSSG | HSA |
| | | | | | (1-398); | | | GSSG | |
| | | | | | G121D; | | | GSSG | |
| | | | | | P122H; | | | (SEQ | |
| | | | | | K124I | | | ID | |
| | | | | | | | | NO: | |
| | | | | | | | | 33) | |
| 93 | | | | | hCPN1 | | TEV | GSSG | HSA |
| | | | | | (1-398); | | | GSSG | |
| | | | | | G121R; | | | GSSG | |
| | | | | | P122E; | | | (SEQ | |
| | | | | | N123Y; | | | ID | |
| | | | | | K124I | | | NO: | |
| | | | | | | | | 33) | |
| 94 | | | | | hCPN1 | | TEV | GSSG | HSA |
| | | | | | (1-398); | | | GSSG | |
| | | | | | G121D; | | | GSSG | |
| | | | | | P122H; | | | (SEQ | |
| | | | | | K124Q | | | ID | |
| | | | | | | | | NO: | |
| | | | | | | | | 33) | |
| 95 | | | | | hCPN1 | | TEV | GSSG | HSA |
| | | | | | (1-398); | | | GSSG | |
| | | | | | G121I; | | | GSSG | |
| | | | | | N123D | | | (SEQ | |
| | | | | | | | | ID | |
| | | | | | | | | NO: | |
| | | | | | | | | 33) | |
| 96 | | | | | hCPN1 | | TEV | GSSG | HSA |
| | | | | | (1-398); | | | GSSG | |
| | | | | | P122W; | | | GSSG | |
| | | | | | N123R; | | | (SEQ | |
| | | | | | K124Y | | | ID | |
| | | | | | | | | NO: | |
| | | | | | | | | 33) | |
| 97 | | | | | hCPN1 | | TEV | GSSG | HSA |
| | | | | | (1-398); | | | GSSG | |
| | | | | | P122Y; | | | GSSG | |
| | | | | | N123R; | | | (SEQ | |
| | | | | | K124Y | | | ID | |
| | | | | | | | | NO: | |
| | | | | | | | | 33) | |
| 98 | | | | | hCPN1 | | TEV | GSSG | HSA |
| | | | | | (1-398); | | | GSSG | |
| | | | | | K124Q | | | GSSG | |
| | | | | | | | | (SEQ | |
| | | | | | | | | ID | |
| | | | | | | | | NO: | |
| | | | | | | | | 33) | |
| 99 | | | | | hCPN1 | | TEV | GSSG | HSA |
| | | | | | (1-398); | | | GSSG | |
| | | | | | G121T; | | | GSSG | |
| | | | | | P122Y; | | | (SEQ | |
| | | | | | K124Q; | | | ID | |
| | | | | | P125D; | | | NO: | |
| | | | | | E297P; | | | 33) | |
| | | | | | E298Q | | | | |
| 100 | | | | | hCPN1 | | TEV | GSSG | HSA |
| | | | | | (1-398); | | | GSSG | |
| | | | | | G121T; | | | GSSG | |
| | | | | | P122Y; | | | (SEQ | |
| | | | | | K124Q; | | | ID | |
| | | | | | P125D; | | | NO: | |
| | | | | | E297P | | | 33) | |
| 101 | | | | | hCPN1 | | TEV | GSSG | HSA |
| | | | | | (1-398); | | | GSSG | |
| | | | | | D292I; | | | GSSG | |
| | | | | | K293I; | | | (SEQ | |
| | | | | | F294W | | | ID | |
| | | | | | | | | NO: | |
| | | | | | | | | 33) | |
| 102 | | | | | hCPN1 | | TEV | GSSG | HSA |
| | | | | | (1-398); | | | GSSG | |
| | | | | | K293L; | | | GSSG | |
| | | | | | E297P; | | | (SEQ | |
| | | | | | E298Q | | | ID | |
| | | | | | | | | NO: | |
| | | | | | | | | 33) | |
| 103 | | | | | hCPN1 | | TEV | GSSG | HSA |
| | | | | | (1-398); | | | GSSG | |
| | | | | | D292L; | | | GSSG | |
| | | | | | K293I; | | | (SEQ | |
| | | | | | P295L | | | ID | |
| | | | | | | | | NO: | |
| | | | | | | | | 33) | |
| 104 | | | | | hCPN1 | | TEV | GSSG | HSA |
| | | | | | (1-398); | | | GSSG | |
| | | | | | D292L; | | | GSSG | |
| | | | | | K293I | | | (SEQ | |
| | | | | | | | | ID | |
| | | | | | | | | NO: | |
| | | | | | | | | 33) | |
| 105 | | | | | hCPN1 | | TEV | GSSG | HSA |
| | | | | | (1-398); | | | GSSG | |
| | | | | | D292N; | | | GSSG | |
| | | | | | K293A; | | | (SEQ | |
| | | | | | P295T; | | | ID | |
| | | | | | E298S | | | NO: | |
| | | | | | | | | 33) | |
| 106 | | | | | hCPN1 | | TEV | GSSG | HSA |
| | | | | | (1-398); | | | GSSG | |
| | | | | | D292N; | | | GSSG | |
| | | | | | K293A; | | | (SEQ | |
| | | | | | E298S | | | ID | |
| | | | | | | | | NO: | |
| | | | | | | | | 33) | |
| 107 | | | | | hCPN1 | | TEV | GSSG | HSA |
| | | | | | (1-398); | | | GSSG | |
| | | | | | D292I; | | | GSSG | |
| | | | | | K293A; | | | (SEQ | |
| | | | | | E294W | | | ID | |
| | | | | | | | | NO: | |
| | | | | | | | | 33) | |
| 108 | | | | | hCPN1 | | TEV | GSSG | HSA |
| | | | | | (1-398); | | | GSSG | |
| | | | | | D292L; | | | GSSG | |
| | | | | | K293A; | | | (SEQ | |
| | | | | | E294W | | | ID | |
| | | | | | | | | NO: | |
| | | | | | | | | 33) | |
| 109 | | | | | hCPN1 | | TEV | GSSG | HSA |
| | | | | | (1-398); | | | GSSG | |
| | | | | | D292L; | | | GSSG | |
| | | | | | K293V; | | | (SEQ | |
| | | | | | E295L | | | ID | |
| | | | | | | | | NO: | |
| | | | | | | | | 33) | |
| 110 | | | | | hCPN1 | | TEV | GSSG | HSA |
| | | | | | (1-398); | | | GSSG | |
| | | | | | D292L; | | | GSSG | |
| | | | | | K293V; | | | (SEQ | |
| | | | | | E298D | | | ID | |
| | | | | | | | | NO: | |
| | | | | | | | | 33) | |
| 111 | | | | | hCPN1 | | TEV | GSSG | HSA |
| | | | | | (1-398); | | | GSSG | |
| | | | | | K293N | | | GSSG | |
| | | | | | | | | (SEQ | |
| | | | | | | | | ID | |
| | | | | | | | | NO: | |
| | | | | | | | | 33) | |
| 112 | | | | | hCPN1 | | TEV | GSSG | HSA |
| | | | | | (1-398); | | | GSSG | |
| | | | | | K293L; | | | GSSG | |
| | | | | | F294W; | | | (SEQ | |
| | | | | | E298L | | | ID | |
| | | | | | | | | NO: | |
| | | | | | | | | 33) | |
| 113 | | | | | hCPN1 | | TEV | GSSG | HSA |
| | | | | | (1-398); | | | GSSG | |
| | | | | | D292N; | | | GSSG | |
| | | | | | K293L; | | | (SEQ | |
| | | | | | F294W | | | ID | |
| | | | | | | | | NO: | |
| | | | | | | | | 33) | |
| 114 | | | | | hCPN1 | | TEV | GSSG | HSA |
| | | | | | (1-398); | | | GSSG | |
| | | | | | N123W; | | | GSSG | |
| | | | | | K124R; | | | (SEQ | |
| | | | | | P125A; | | | ID | |
| | | | | | Y127D; | | | NO: | |
| | | | | | D292I; | | | 33) | |
| | | | | | K293I; | | | | |
| | | | | | F294Q | | | | |
| 115 | | | | | hCPN1 | | TEV | GSSG | HSA |
| | | | | | (1-398); | | | GSSG | |
| | | | | | N123Y; | | | GSSG | |
| | | | | | K124R; | | | (SEQ | |
| | | | | | P127E; | | | ID | |
| | | | | | D292I; | | | NO: | |
| | | | | | K293V; | | | 33) | |
| | | | | | F294M | | | | |
| 116 | | | | | hCPN1 | | TEV | GSSG | HSA |
| | | | | | (1-398); | | | GSSG | |
| | | | | | G121T; | | | GSSG | |
| | | | | | P122Y; | | | (SEQ | |
| | | | | | K124Q; | | | ID | |
| | | | | | P125D; | | | NO: | |
| | | | | | Y127W; | | | 33) | |
| | | | | | D292I; | | | | |
| | | | | | K293L; | | | | |
| | | | | | E297P | | | | |
| 117 | | | | | hCPN1 | | TEV | GSSG | HSA |
| | | | | | (1-398); | | | GSSG | |
| | | | | | N123Y; | | | GSSG | |
| | | | | | K124R; | | | (SEQ | |
| | | | | | Y127D; | | | ID | |
| | | | | | K293I | | | NO: | |
| | | | | | | | | 33) | |
| 118 | | | | | hCPN1 | | TEV | GSSG | HSA |
| | | | | | (1-398); | | | GSSG | |
| | | | | | G121D; | | | GSSG | |
| | | | | | P122S; | | | (SEQ | |
| | | | | | N123T; | | | ID | |
| | | | | | K124I; | | | NO: | |
| | | | | | D292N; | | | 33) | |
| | | | | | K293A; | | | | |
| | | | | | E298S | | | | |
| 119 | | | | | hCPN1 | | TEV | GSSG | HSA |
| | | | | | (1-398); | | | GSSG | |
| | | | | | G121Q; | | | GSSG | |
| | | | | | P122W; | | | (SEQ | |
| | | | | | N123D; | | | ID | |
| | | | | | Y127I; | | | NO: | |
| | | | | | D292L; | | | 33) | |
| | | | | | K293A; | | | | |
| | | | | | E294I | | | | |
| 120 | | | | | hCPN1 | | TEV | GSSG | HSA |
| | | | | | (1-398); | | | GSSG | |
| | | | | | G121D; | | | GSSG | |
| | | | | | P122W; | | | (SEQ | |
| | | | | | N123D; | | | ID | |
| | | | | | Y127I; | | | NO: | |
| | | | | | K293A; | | | 33) | |
| | | | | | E294W | | | | |
| 121 | | | | | hCPN1 | | TEV | GSSG | HSA |
| | | | | | (1-398); | | | GSSG | |
| | | | | | P122W; | | | GSSG | |
| | | | | | N123R; | | | (SEQ | |
| | | | | | K124H; | | | ID | |
| | | | | | Y127S; | | | NO: | |
| | | | | | D292L; | | | 33) | |
| | | | | | K293V; | | | | |
| | | | | | E298W | | | | |
| 122 | | | | | hCPN1 | | TEV | GSSG | HSA |
| | | | | | (1-398); | | | GSSG | |
| | | | | | P122W; | | | GSSG | |
| | | | | | N123R; | | | (SEQ | |
| | | | | | K124Y; | | | ID | |
| | | | | | D292L; | | | NO: | |
| | | | | | K293V; | | | 33) | |
| | | | | | E298D | | | | |
| 123 | | | | | hCPN1 | | TEV | GSSG | HSA |
| | | | | | (1-398); | | | GSSG | |
| | | | | | K124Q; | | | GSSG | |
| | | | | | K293L; | | | (SEQ | |
| | | | | | F294W; | | | ID | |
| | | | | | E298L | | | NO: | |
| | | | | | | | | 33) | |
| 124 | | | | | hCPN1 | | TEV | GSSG | HSA |
| | | | | | (1-398); | | | GSSG | |
| | | | | | K124D; | | | GSSG | |
| | | | | | K293L; | | | (SEQ | |
| | | | | | F294W; | | | ID | |
| | | | | | E297D | | | NO: | |
| | | | | | | | | 33) | |
| 125 | | | | | hCPN1 | | TEV | GSSG | HSA |
| | | | | | (1-398); | | | GSSG | |
| | | | | | P125H | | | GSSG | |
| | | | | | | | | (SEQ | |
| | | | | | | | | ID | |
| | | | | | | | | NO: | |
| | | | | | | | | 33) | |
| 126 | | | | | hCPN1 | | TEV | GSSG | HSA |
| | | | | | (1-398); | | | GSSG | |
| | | | | | P125L | | | GSSG | |
| | | | | | | | | (SEQ | |
| | | | | | | | | ID | |
| | | | | | | | | NO: | |
| | | | | | | | | 33) | |
| 127 | | | | | hCPN1 | | TEV | GSSG | HSA |
| | | | | | (1-398); | | | GSSG | |
| | | | | | P122A; | | | GSSG | |
| | | | | | N123D; | | | (SEQ | |
| | | | | | K124I; | | | ID | |
| | | | | | P125S | | | NO: | |
| | | | | | | | | 33) | |
| 128 | | | | | hCPN1 | | TEV | GSSG | HSA |
| | | | | | (1-398); | | | GSSG | |
| | | | | | P122A; | | | GSSG | |
| | | | | | N123D; | | | (SEQ | |
| | | | | | K124S; | | | ID | |
| | | | | | P125S | | | NO: | |
| | | | | | | | | 33) | |
| 129 | | | | | hCPN1 | | TEV | GSSG | HSA |
| | | | | | (1-398); | | | GSSG | |
| | | | | | G121E; | | | GSSG | |
| | | | | | P122R; | | | (SEQ | |
| | | | | | N123D; | | | ID | |
| | | | | | K124I; | | | NO: | |
| | | | | | P125S | | | 33) | |
| 130 | | | | | hCPN1 | | TEV | GSSG | HSA |
| | | | | | (1-398); | | | GSSG | |
| | | | | | G121D; | | | GSSG | |
| | | | | | P122R; | | | (SEQ | |
| | | | | | N123D; | | | ID | |
| | | | | | K124T; | | | NO: | |
| | | | | | P125S; | | | 33) | |
| | | | | | G126Q | | | | |
| 131 | | | | | hCPN1 | | TEV | GSSG | HSA |
| | | | | | (1-398); | | | GSSG | |
| | | | | | N123D; | | | GSSG | |
| | | | | | K124D; | | | (SEQ | |
| | | | | | P125S; | | | ID | |
| | | | | | G126Q | | | NO: | |
| | | | | | | | | 33) | |
| 132 | | | | | hCPN1 | | TEV | GSSG | HSA |
| | | | | | (1-398); | | | GSSG | |
| | | | | | N68D | | | GSSG | |
| | | | | | | | | (SEQ | |
| | | | | | | | | ID | |
| | | | | | | | | NO: | |
| | | | | | | | | 33) | |
| 133 | | | | | hCPN1 | | TEV | GSSG | HSA |
| | | | | | (1-398); | | | GSSG | |
| | | | | | N68K; | | | GSSG | |
| | | | | | K293N | | | (SEQ | |
| | | | | | | | | ID | |
| | | | | | | | | NO: | |
| | | | | | | | | 33) | |
| 134 | | | | | hCPN1 | | TEV | GSSG | HSA |
| | | | | | (1-398); | | | GSSG | |
| | | | | | V201H | | | GSSG | |
| | | | | | | | | (SEQ | |
| | | | | | | | | ID | |
| | | | | | | | | NO: | |
| | | | | | | | | 33) | |
| 135 | | | | | hCPN1 | | TEV | GSSG | HSA |
| | | | | | (1-398); | | | GSSG | |
| | | | | | N203D | | | GSSG | |
| | | | | | | | | (SEQ | |
| | | | | | | | | ID | |
| | | | | | | | | NO: | |
| | | | | | | | | 33) | |
| 136 | | | | | hCPN1 | | TEV | GSSG | HSA |
| | | | | | (1-398); | | | GSSG | |
| | | | | | G198D | | | GSSG | |
| | | | | | | | | (SEQ | |
| | | | | | | | | ID | |
| | | | | | | | | NO: | |
| | | | | | | | | 33) | |
| 137 | | | | | hCPN1 | | TEV | GSSG | HSA |
| | | | | | (1-398); | | | GSSG | |
| | | | | | G198D; | | | GSSG | |
| | | | | | V201Y | | | (SEQ | |
| | | | | | | | | ID | |
| | | | | | | | | NO: | |
| | | | | | | | | 33) | |
| 138 | | | | | hCPN1 | | TEV | GSSG | HSA |
| | | | | | (1-398); | | | GSSG | |
| | | | | | A70V | | | GSSG | |
| | | | | | | | | (SEQ | |
| | | | | | | | | ID | |
| | | | | | | | | NO: | |
| | | | | | | | | 33) | |
| 139 | | | | | hCPN1 | | TEV | GSSG | HSA |
| | | | | | (1-398); | | | GSSG | |
| | | | | | N68D; | | | GSSG | |
| | | | | | P125S | | | (SEQ | |
| | | | | | | | | ID | |
| | | | | | | | | NO: | |
| | | | | | | | | 33) | |
| 140 | | | | | hCPN1 | | TEV | GSSG | HSA |
| | | | | | (1-398); | | | GSSG | |
| | | | | | N68D; | | | GSSG | |
| | | | | | A70V; | | | (SEQ | |
| | | | | | P125S | | | ID | |
| | | | | | | | | NO: | |
| | | | | | | | | 33) | |
| 141 | | | | | hCPN1 | | | GSSG | HSA |
| | | | | | (1-398); | | | GSSG | |
| | | | | | E288Q | | | GSSG | |
| | | | | | | | | (SEQ | |
| | | | | | | | | ID | |
| | | | | | | | | NO: | |
| | | | | | | | | 33) | |
| 142 | | | | | hCPN1 | | | GSSG | HSA |
| | | | | | (1-398); | | | GSSG | |
| | | | | | Y266F | | | GSSG | |
| | | | | | | | | (SEQ | |
| | | | | | | | | ID | |
| | | | | | | | | NO: | |
| | | | | | | | | 33) | |
| 143 | | | | | hCPN1 | | | GSSG | HSA |
| | | | | | (1-398); | | | GSSG | |
| | | | | | Y266F; | | | GSSG | |
| | | | | | E288Q | | | (SEQ | |
| | | | | | | | | ID | |
| | | | | | | | | NO: | |
| | | | | | | | | 33) | |
| 144 | | | | | hCPN1 | | | GSSG | HSA |
| | | | | | (1-398); | | | GSSG | |
| | | | | | A199S | | | GSSG | |
| | | | | | | | | (SEQ | |
| | | | | | | | | ID | |
| | | | | | | | | NO: | |
| | | | | | | | | 33) | |
| 145 | | | | | hCPN1 | | | GSSG | HSA |
| | | | | | (1-398); | | | GSSG | |
| | | | | | K124R; | | | GSSG | |
| | | | | | P125S | | | (SEQ | |
| | | | | | | | | ID | |
| | | | | | | | | NO: | |
| | | | | | | | | 33) | |
| 146 | | | | | hCPN1 | | | GSSG | HSA |
| | | | | | (1-398); | | | GSSG | |
| | | | | | G121T; | | | GSSG | |
| | | | | | P122Y; | | | (SEQ | |
| | | | | | K124Q; | | | ID | |
| | | | | | P125D | | | NO: | |
| | | | | | | | | 33) | |
| 147 | | | | | hCPN1 | | | GSSG | HSA |
| | | | | | (1-398); | | | GSSG | |
| | | | | | N123Y; | | | GSSG | |
| | | | | | K124R | | | (SEQ | |
| | | | | | | | | ID | |
| | | | | | | | | NO: | |
| | | | | | | | | 33) | |
| 148 | | | | | hCPN1 | | | GSSG | HSA |
| | | | | | (1-398); | | | GSSG | |
| | | | | | G121D; | | | GSSG | |
| | | | | | P122D; | | | (SEQ | |
| | | | | | N123T; | | | ID | |
| | | | | | K124I | | | NO: | |
| | | | | | | | | 33) | |
| 149 | | | | | hCPN1 | | | GSSG | HSA |
| | | | | | (1-398); | | | GSSG | |
| | | | | | G121D; | | | GSSG | |
| | | | | | P122H; | | | (SEQ | |
| | | | | | K124I | | | ID | |
| | | | | | | | | NO: | |
| | | | | | | | | 33) | |
| 150 | | | | | hCPN1 | | | GSSG | HSA |
| | | | | | (1-398); | | | GSSG | |
| | | | | | G121R; | | | GSSG | |
| | | | | | P122E; | | | (SEQ | |
| | | | | | N123Y; | | | ID | |
| | | | | | K124I | | | NO: | |
| | | | | | | | | 33) | |
| 151 | | | | | hCPN1 | | | GSSG | HSA |
| | | | | | (1-398); | | | GSSG | |
| | | | | | G121D; | | | GSSG | |
| | | | | | P122H; | | | (SEQ | |
| | | | | | K124Q | | | ID | |
| | | | | | | | | NO: | |
| | | | | | | | | 33) | |
| 152 | | | | | hCPN1 | | | GSSG | HSA |
| | | | | | (1-398); | | | GSSG | |
| | | | | | G121I; | | | GSSG | |
| | | | | | N123D | | | (SEQ | |
| | | | | | | | | ID | |
| | | | | | | | | NO: | |
| | | | | | | | | 33) | |
| 153 | | | | | hCPN1 | | TEV | GSSG | HSA |
| | | | | | (1-320); | | | GSSG | |
| | | | | | L55N; | | | GSSG | |
| | | | | | H161R; | | | (SEQ | |
| | | | | | N188D; | | | ID | |
| | | | | | V190K; | | | NO: | |
| | | | | | K229E; | | | 33) | |
| | | | | | L230W; | | | | |
| | | | | | N281D; | | | | |
| | | | | | C282S; | | | | |
| | | | | | F283Y; | | | | |
| | | | | | R308K; | | | | |
| | | | | | Q320N | | | | |
| 154 | | | | | hCPN1 | | TEV | GSSG | HSA |
| | | | | | (1-320); | | | GSSG | |
| | | | | | L55N; | | | GSSG | |
| | | | | | H161S; | | | (SEQ | |
| | | | | | N188D; | | | ID | |
| | | | | | V190R; | | | NO: | |
| | | | | | K229E; | | | 33) | |
| | | | | | L230W; | | | | |
| | | | | | C282S; | | | | |
| | | | | | F283Y; | | | | |
| | | | | | R308K; | | | | |
| | | | | | Q320N | | | | |
| 155 | | | | | hCPN1 | | TEV | GSSG | HSA |
| | | | | | (1-320); | | | GSSG | |
| | | | | | L55N; | | | GSSG | |
| | | | | | H161K; | | | (SEQ | |
| | | | | | N188D; | | | ID | |
| | | | | | V190K; | | | NO: | |
| | | | | | K229E; | | | 33) | |
| | | | | | L230W; | | | | |
| | | | | | C282S; | | | | |
| | | | | | F283Y; | | | | |
| | | | | | R308K; | | | | |
| | | | | | Q320N | | | | |
| 156 | | | | | hCPN1 | | | GSSG | HSA |
| | | | | | (1-398); | | | GSSG | |
| | | | | | P122W; | | | GSSG | |
| | | | | | N123R; | | | (SEQ | |
| | | | | | K124Y | | | ID | |
| | | | | | | | | NO: | |
| | | | | | | | | 33) | |
| 157 | | | | | hCPN1 | | | GSSG | HSA |
| | | | | | (1-398); | | | GSSG | |
| | | | | | P122Y; | | | GSSG | |
| | | | | | N123R; | | | (SEQ | |
| | | | | | K124Y | | | ID | |
| | | | | | | | | NO: | |
| | | | | | | | | 33) | |
| 158 | | | | | hCPN1 | | | GSSG | HSA |
| | | | | | (1-398); | | | GSSG | |
| | | | | | K124Q | | | GSSG | |
| | | | | | | | | (SEQ | |
| | | | | | | | | ID | |
| | | | | | | | | NO: | |
| | | | | | | | | 33) | |
| 159 | | | | | hCPN1 | | | GSSG | HSA |
| | | | | | (1-398); | | | GSSG | |
| | | | | | G121D; | | | GSSG | |
| | | | | | | | | (SEQ | |
| | | | | | | | | ID | |
| | | | | | | | | NO: | |
| | | | | | | | | 33) | |
| 160 | | | | | hCPN1 | | | GSSG | HSA |
| | | | | | (1-398); | | | GSSG | |
| | | | | | N123D; | | | GSSG | |
| | | | | | | | | (SEQ | |
| | | | | | | | | ID | |
| | | | | | | | | NO: | |
| | | | | | | | | 33) | |
| 161 | | | | | hCPN1 | | | GSSG | HSA |
| | | | | | (1-398); | | | GSSG | |
| | | | | | G121D; | | | GSSG | |
| | | | | | N123D; | | | (SEQ | |
| | | | | | | | | ID | |
| | | | | | | | | NO: | |
| | | | | | | | | 33) | |
| 162 | | | | | hCPN1 | | | GSSG | HSA |
| | | | | | (1-398); | | | GSSG | |
| | | | | | P122A; | | | GSSG | |
| | | | | | | | | (SEQ | |
| | | | | | | | | ID | |
| | | | | | | | | NO: | |
| | | | | | | | | 33) | |
| 163 | | | | | hCPN1 | | | GSSG | HSA |
| | | | | | (1-398); | | | GSSG | |
| | | | | | P122R; | | | GSSG | |
| | | | | | | | | (SEQ | |
| | | | | | | | | ID | |
| | | | | | | | | NO: | |
| | | | | | | | | 33) | |
| 164 | | | | | hCPN1 | | | GSSG | HSA |
| | | | | | (1-398); | | | GSSG | |
| | | | | | K124I; | | | GSSG | |
| | | | | | | | | (SEQ | |
| | | | | | | | | ID | |
| | | | | | | | | NO: | |
| | | | | | | | | 33) | |
| 165 | | | | | hCPN1 | | | GSSG | HSA |
| | | | | | (1-398); | | | GSSG | |
| | | | | | G121D; | | | GSSG | |
| | | | | | N123D; | | | (SEQ | |
| | | | | | K124I; | | | ID | |
| | | | | | | | | NO: | |
| | | | | | | | | 33) | |
| 166 | | | | | hCPN1 | | | GSSG | HSA |
| | | | | | (1-398); | | | GSSG | |
| | | | | | P125S; | | | GSSG | |
| | | | | | | | | (SEQ | |
| | | | | | | | | ID | |
| | | | | | | | | NO: | |
| | | | | | | | | 33) | |
| 167 | | | | | hCPN1 | | | GSSG | HSA |
| | | | | | (1-398); | | | GSSG | |
| | | | | | P122G; | | | GSSG | |
| | | | | | | | | (SEQ | |
| | | | | | | | | ID | |
| | | | | | | | | NO: | |
| | | | | | | | | 33) | |
| 168 | | | | | hCPN1 | | | GSSG | HSA |
| | | | | | (1-398); | | | GSSG | |
| | | | | | K124S; | | | GSSG | |
| | | | | | | | | (SEQ | |
| | | | | | | | | ID | |
| | | | | | | | | NO: | |
| | | | | | | | | 33) | |
| 169 | | | | | hCPN1 | | | GSSG | HSA |
| | | | | | (1-398); | | | GSSG | |
| | | | | | K124G; | | | GSSG | |
| | | | | | | | | (SEQ | |
| | | | | | | | | ID | |
| | | | | | | | | NO: | |
| | | | | | | | | 33) | |
| 170 | | | | | hCPN1 | | | GSSG | HSA |
| | | | | | (1-398); | | | GSSG | |
| | | | | | P125N; | | | GSSG | |
| | | | | | | | | (SEQ | |
| | | | | | | | | ID | |
| | | | | | | | | NO: | |
| | | | | | | | | 33) | |
| 171 | | | | | hCPN1 | | | GSSG | HSA |
| | | | | | (1-398); | | | GSSG | |
| | | | | | P125G; | | | GSSG | |
| | | | | | | | | (SEQ | |
| | | | | | | | | ID | |
| | | | | | | | | NO: | |
| | | | | | | | | 33) | |
| 172 | | | | | hCPN1 | | | GSSG | HSA |
| | | | | | (1-398); | | | GSSG | |
| | | | | | E297Q; | | | GSSG | |
| | | | | | | | | (SEQ | |
| | | | | | | | | ID | |
| | | | | | | | | NO: | |
| | | | | | | | | 33) | |
| 173 | | | | | hCPN1 | | | GSSG | HSA |
| | | | | | (1-398); | | | GSSG | |
| | | | | | V180F; | | | GSSG | |
| | | | | | | | | (SEQ | |
| | | | | | | | | ID | |
| | | | | | | | | NO: | |
| | | | | | | | | 33) | |
| 174 | | | | | hCPN1 | | | GSSG | HSA |
| | | | | | (1-398); | | | GSSG | |
| | | | | | S192A; | | | GSSG | |
| | | | | | | | | (SEQ | |
| | | | | | | | | ID | |
| | | | | | | | | NO: | |
| | | | | | | | | 33) | |
| 175 | | | | | hCPN1 | | | GSSG | HSA |
| | | | | | (1-398); | | | GSSG | |
| | | | | | N276V; | | | GSSG | |
| | | | | | | | | (SEQ | |
| | | | | | | | | ID | |
| | | | | | | | | NO: | |
| | | | | | | | | 33) | |
| 176 | | | | | hCPN1 | | | GSSG | HSA |
| | | | | | (1-398); | | | GSSG | |
| | | | | | E284I; | | | GSSG | |
| | | | | | | | | (SEQ | |
| | | | | | | | | ID | |
| | | | | | | | | NO: | |
| | | | | | | | | 33) | |
| 177 | | | | | hCPN1 | | | GSSG | HSA |
| | | | | | (1-398); | | | GSSG | |
| | | | | | K60F; | | | GSSG | |
| | | | | | | | | (SEQ | |
| | | | | | | | | ID | |
| | | | | | | | | NO: | |
| | | | | | | | | 33) | |
| 178 | mMBP | AAAQ | TEV | | hCPN1 | | | | |
| | | TNAA | | | (1-398); | | | | |
| | | AASS | | | Y266F; | | | | |
| | | ASLE | | | E288Q | | | | |
| | | (SEQ | | | | | | | |
| | | ID | | | | | | | |
| | | NO: | | | | | | | |
| | | 35) | | | | | | | |
| 179 | mMBP | AAAQ | TEV | | hCPN1 | | TEV | GSSG | HSA |
| | | TNAA | | | (1-398); | | | GSSG | |
| | | AASS | | | Y266F; | | | GSSG | |
| | | ASLE | | | E288Q | | | (SEQ | |
| | | (SEQ | | | | | | ID | |
| | | ID | | | | | | NO: | |
| | | NO: | | | | | | 33) | |
| | | 35) | | | | | | | |
| 180 | mMBP | AAAQ | TEV | | hCPN1 | | | | |
| | | TNAA | | | (1-438) | | | | |
| | | AASS | | | | | | | |
| | | ASLE | | | | | | | |
| | | (SEQ | | | | | | | |
| | | ID | | | | | | | |
| | | NO: | | | | | | | |
| | | 35) | | | | | | | |
| 181 | mMBP | AAAQ | TEV | | hCPN1 | | TEV | GSSG | HSA |
| | | TNAA | | | (1-438) | | | GSSG | |
| | | AASS | | | | | | GSSG | |
| | | ASLE | | | | | | (SEQ | |
| | | (SEQ | | | | | | ID | |
| | | ID | | | | | | NO: | |
| | | NO: | | | | | | 33) | |
| | | 35) | | | | | | | |
| 182 | mMBP | AAAQ | TEV | | hCPN1 | | | | |
| | | TNAA | | | (1-438); | | | | |
| | | AASS | | | Y266F; | | | | |
| | | ASLE | | | E288Q | | | | |
| | | (SEQ | | | | | | | |
| | | ID | | | | | | | |
| | | NO: | | | | | | | |
| | | 35) | | | | | | | |
| 183 | mMBP | AAAQ | TEV | | hCPN1 | | TEV | GSSG | HSA |
| | | TNAA | | | (1-438); | | | GSSG | |
| | | AASS | | | Y266F; | | | GSSG | |
| | | ASLE | | | E288Q | | | (SEQ | |
| | | (SEQ | | | | | | ID | |
| | | ID | | | | | | NO: | |
| | | NO: | | | | | | 33) | |
| | | 35) | | | | | | | |
| 184 | GST | AAAQ | TEV | | hCPN1 | | TEV | GSSG | HSA |
| | | TNAA | | | (1-398); | | | GSSG | |
| | | AASS | | | Y266F; | | | GSSG | |
| | | ASLE | | | E288Q | | | (SEQ | |
| | | (SEQ | | | | | | ID | |
| | | ID | | | | | | NO: | |
| | | NO: | | | | | | 33) | |
| | | 35) | | | | | | | |
| 185 | GST | AAAQ | TEV | | hCPN1 | | | | |
| | | TNAA | | | (1-398) | | | | |
| | | AASS | | | | | | | |
| | | ASLE | | | | | | | |
| | | (SEQ | | | | | | | |
| | | ID | | | | | | | |
| | | NO: | | | | | | | |
| | | 35) | | | | | | | |
| 186 | GST | AAAQ | TEV | | hCPN1 | | | | |
| | | TNAA | | | (1-398); | | | | |
| | | AASS | | | Y266F; | | | | |
| | | ASLE | | | E288Q | | | | |
| | | (SEQ | | | | | | | |
| | | ID | | | | | | | |
| | | NO: | | | | | | | |
| | | 35) | | | | | | | |
| 187 | | | | | hCPN1 | | TEV | GSSG | HSA |
| | | | | | (1-438); | | | GSSG | |
| | | | | | Y266F; | | | GSSG | |
| | | | | | E288Q; | | | (SEQ | |
| | | | | | 398DDDD | | | ID | |
| | | | | | K399 | | | NO: | |
| | | | | | | | | 33) | |
| 188 | | | | | hCPN1 | | TEV | GSSG | HSA |
| | | | | | (1-438); | | | GSSG | |
| | | | | | Y266F; | | | GSSG | |
| | | | | | E288Q | | | (SEQ | |
| | | | | | | | | ID | |
| | | | | | | | | NO: | |
| | | | | | | | | 33) | |
| 189 | | | | | hCPN1 | | | GSSG | HSA |
| | | | | | (1-438); | | | GSSG | |
| | | | | | Y266F; | | | GSSG | |
| | | | | | E288Q | | | (SEQ | |
| | | | | | | | | ID | |
| | | | | | | | | NO: | |
| | | | | | | | | 33) | |
| 190 | | | | | hCPN1 | | | GSSG | HSA |
| | | | | | (1-320); | | | GSSG | |
| | | | | | L55N; | | | GSSG | |
| | | | | | H161R; | | | (SEQ | |
| | | | | | N188D; | | | ID | |
| | | | | | V190K; | | | NO: | |
| | | | | | K229E; | | | 33) | |
| | | | | | L230W; | | | | |
| | | | | | N281D; | | | | |
| | | | | | C282S; | | | | |
| | | | | | F283Y; | | | | |
| | | | | | R308K; | | | | |
| | | | | | Q320N | | | | |
| 191 | | | | | hCPN1 | | | GSSG | HSA |
| | | | | | (1-320); | | | GSSG | |
| | | | | | L55N; | | | GSSG | |
| | | | | | H161S; | | | (SEQ | |
| | | | | | N188D; | | | ID | |
| | | | | | V190R; | | | NO: | |
| | | | | | K229E; | | | 33) | |
| | | | | | L230W; | | | | |
| | | | | | C282S; | | | | |
| | | | | | F283Y; | | | | |
| | | | | | R308K; | | | | |
| | | | | | Q320N | | | | |
| 192 | | | | | hCPN1 | | | GSSG | HSA |
| | | | | | (1-320); | | | GSSG | |
| | | | | | L55N; | | | GSSG | |
| | | | | | H161K; | | | (SEQ | |
| | | | | | N188D; | | | ID | |
| | | | | | V190K; | | | NO: | |
| | | | | | K229E; | | | 33) | |
| | | | | | L230W; | | | | |
| | | | | | C282S; | | | | |
| | | | | | F283Y; | | | | |
| | | | | | R308K; | | | | |
| | | | | | Q320N | | | | |
| 193 | | | | | hCPN1 | | | GSSG | HSA |
| | | | | | (1-320); | | | GSSG | |
| | | | | | L55N; | | | GSSG | |
| | | | | | H161S; | | | (SEQ | |
| | | | | | N188D; | | | ID | |
| | | | | | V190R; | | | NO: | |
| | | | | | K229E; | | | 33) | |
| | | | | | L230K; | | | | |
| | | | | | K233D; | | | | |
| | | | | | C282S; | | | | |
| | | | | | F283Y; | | | | |
| | | | | | R308K; | | | | |
| | | | | | Q320K | | | | |
| 194 | | | | | hCPN1 | | | GSSG | HSA |
| | | | | | (1-320); | | | GSSG | |
| | | | | | L55N; | | | GSSG | |
| | | | | | H161R; | | | (SEQ | |
| | | | | | N188D; | | | ID | |
| | | | | | V190K; | | | NO: | |
| | | | | | K229E; | | | 33) | |
| | | | | | L230W; | | | | |
| | | | | | K233H; | | | | |
| | | | | | N281D; | | | | |
| | | | | | C282S; | | | | |
| | | | | | F283Y; | | | | |
| | | | | | R308K; | | | | |
| | | | | | Q320N | | | | |
| 195 | | | | | hCPN1 | | | GSSG | HSA |
| | | | | | (1-320); | | | GSSG | |
| | | | | | L55N; | | | GSSG | |
| | | | | | H161R; | | | (SEQ | |
| | | | | | N188D; | | | ID | |
| | | | | | V190K; | | | NO: | |
| | | | | | K229E; | | | 33) | |
| | | | | | L230K; | | | | |
| | | | | | N281D; | | | | |
| | | | | | C282S; | | | | |
| | | | | | F283Y; | | | | |
| | | | | | R308K; | | | | |
| | | | | | Q320N | | | | |
| 196 | | | | | hCPN1 | | | GSSG | HSA |
| | | | | | (1-398); | | | GSSG | |
| | | | | | A199D; | | | GSSG | |
| | | | | | | | | (SEQ | |
| | | | | | | | | ID | |
| | | | | | | | | NO: | |
| | | | | | | | | 33) | |
| 197 | | | | | hCPN1 | | | GSSG | HSA |
| | | | | | (1-398); | | | GSSG | |
| | | | | | G121D; | | | GSSG | |
| | | | | | A199D; | | | (SEQ | |
| | | | | | | | | ID | |
| | | | | | | | | NO: | |
| | | | | | | | | 33) | |
| 198 | | | | | hCPN1 | | | GSSG | HSA |
| | | | | | (1-398); | | | GSSG | |
| | | | | | N123D; | | | GSSG | |
| | | | | | A199D; | | | (SEQ | |
| | | | | | | | | ID | |
| | | | | | | | | NO: | |
| | | | | | | | | 33) | |
| 199 | | | | | hCPN1 | | | GSSG | HSA |
| | | | | | (1-398); | | | GSSG | |
| | | | | | G121D; | | | GSSG | |
| | | | | | N123D; | | | (SEQ | |
| | | | | | A199D; | | | ID | |
| | | | | | | | | NO: | |
| | | | | | | | | 33) | |
| 200 | | | | | hCPN1 | | | GSSG | HSA |
| | | | | | (1-398); | | | GSSG | |
| | | | | | G121D; | | | GSSG | |
| | | | | | N123D; | | | (SEQ | |
| | | | | | K124I; | | | ID | |
| | | | | | A199D; | | | NO: | |
| | | | | | | | | 33) | |
| 201 | | | | | hCPN1 | | | GSSG | HSA |
| | | | | | (1-398); | | | GSSG | |
| | | | | | H66K; | | | GSSG | |
| | | | | | | | | (SEQ | |
| | | | | | | | | ID | |
| | | | | | | | | NO: | |
| | | | | | | | | 33) | |
| 202 | | | | | hCPN1 | | | GSSG | HSA |
| | | | | | (1-398); | | | GSSG | |
| | | | | | Q78E; | | | GSSG | |
| | | | | | | | | (SEQ | |
| | | | | | | | | ID | |
| | | | | | | | | NO: | |
| | | | | | | | | 33) | |
| 203 | | | | | hCPN1 | | | GSSG | HSA |
| | | | | | (1-398); | | | GSSG | |
| | | | | | P125E; | | | GSSG | |
| | | | | | | | | (SEQ | |
| | | | | | | | | ID | |
| | | | | | | | | NO: | |
| | | | | | | | | 33) | |
| 204 | | | | | hCPN1 | | | GSSG | HSA |
| | | | | | (1-398); | | | GSSG | |
| | | | | | P125D; | | | GSSG | |
| | | | | | | | | (SEQ | |
| | | | | | | | | ID | |
| | | | | | | | | NO: | |
| | | | | | | | | 33) | |
| 205 | | | | | hCPN1 | | | GSSG | HSA |
| | | | | | (1-398); | | | GSSG | |
| | | | | | D138K; | | | GSSG | |
| | | | | | | | | (SEQ | |
| | | | | | | | | ID | |
| | | | | | | | | NO: | |
| | | | | | | | | 33) | |
| 206 | | | | | hCPN1 | | | GSSG | HSA |
| | | | | | (1-398); | | | GSSG | |
| | | | | | P296E; | | | GSSG | |
| | | | | | | | | (SEQ | |
| | | | | | | | | ID | |
| | | | | | | | | NO: | |
| | | | | | | | | 33) | |
| 207 | | | | | hCPN1 | | | GSSG | HSA |
| | | | | | (1-398); | | | GSSG | |
| | | | | | P296G; | | | GSSG | |
| | | | | | | | | (SEQ | |
| | | | | | | | | ID | |
| | | | | | | | | NO: | |
| | | | | | | | | 33) | |
| 208 | | | | | hCPN1 | | | GSSG | HSA |
| | | | | | (1-398); | | | GSSG | |
| | | | | | E298G; | | | GSSG | |
| | | | | | | | | (SEQ | |
| | | | | | | | | ID | |
| | | | | | | | | NO: | |
| | | | | | | | | 33) | |
| 209 | | | | | hCPN1 | | | GSSG | HSA |
| | | | | | (1-398); | | | GSSG | |
| | | | | | L300E; | | | GSSG | |
| | | | | | | | | (SEQ | |
| | | | | | | | | ID | |
| | | | | | | | | NO: | |
| | | | | | | | | 33) | |
| 210 | | | | | hCPN1 | | | GSSG | HSA |
| | | | | | (1-398); | | | GSSG | |
| | | | | | Q301R; | | | GSSG | |
| | | | | | | | | (SEQ | |
| | | | | | | | | ID | |
| | | | | | | | | NO: | |
| | | | | | | | | 33) | |
| 211 | | | | | hCPN1 | | | GSSG | HSA |
| | | | | | (1-398); | | | GSSG | |
| | | | | | Q301E; | | | GSSG | |
| | | | | | | | | (SEQ | |
| | | | | | | | | ID | |
| | | | | | | | | NO: | |
| | | | | | | | | 33) | |
| 212 | | | | | hCPN1 | | | GSSG | HSA |
| | | | | | (1-398); | | | GSSG | |
| | | | | | R302E; | | | GSSG | |
| | | | | | | | | (SEQ | |
| | | | | | | | | ID | |
| | | | | | | | | NO: | |
| | | | | | | | | 33) | |
| 213 | | | | | hCPN1 | | | GSSG | HSA |
| | | | | | (1-398); | | | GSSG | |
| | | | | | D292N; | | | GSSG | |
| | | | | | | | | (SEQ | |
| | | | | | | | | ID | |
| | | | | | | | | NO: | |
| | | | | | | | | 33) | |
| 214 | | | | | hCPN1 | | | GSSG | HSA |
| | | | | | (1-398); | | | GSSG | |
| | | | | | F189C; | | | GSSG | |
| | | | | | | | | (SEQ | |
| | | | | | | | | ID | |
| | | | | | | | | NO: | |
| | | | | | | | | 33) | |
| 215 | | | | | hCPN1 | GSSG | HSA | GGGG | HHHH |
| | | | | | (1-398) | GSSG | | (SEQ | HHHH |
| | | | | | | GSSG | | ID | HH |
| | | | | | | (SEQ | | NO: | (SEQ |
| | | | | | | ID | | 39) | ID |
| | | | | | | NO: | | | NO: |
| | | | | | | 33) | | | 40) |
| 216 | | | | | aCPN1 | | | GSSG | HSA |
| | | | | | | | | GSSG | |
| | | | | | | | | GSSG | |
| | | | | | | | | (SEQ | |
| | | | | | | | | ID | |
| | | | | | | | | NO: | |
| | | | | | | | | 33) | |
| 217 | | | | | bCPN1 | | | GSSG | HSA |
| | | | | | | | | GSSG | |
| | | | | | | | | GSSG | |
| | | | | | | | | (SEQ | |
| | | | | | | | | ID | |
| | | | | | | | | NO: | |
| | | | | | | | | 33) | |
| 218 | | | | | mCPN1 | | | GSSG | HSA |
| | | | | | | | | GSSG | |
| | | | | | | | | GSSG | |
| | | | | | | | | (SEQ | |
| | | | | | | | | ID | |
| | | | | | | | | NO: | |
| | | | | | | | | 33) | |
| 219 | | | | | vCPN1 | | | GSSG | HSA |
| | | | | | | | | GSSG | |
| | | | | | | | | GSSG | |
| | | | | | | | | (SEQ | |
| | | | | | | | | ID | |
| | | | | | | | | NO: | |
| | | | | | | | | 33) | |
| 220 | | | | | uCPN1 | | | GSSG | HSA |
| | | | | | | | | GSSG | |
| | | | | | | | | GSSG | |
| | | | | | | | | (SEQ | |
| | | | | | | | | ID | |
| | | | | | | | | NO: | |
| | | | | | | | | 33) | |
| 221 | | | | | hCPN1 | | | GSSG | HSA |
| | | | | | (1-398); | | | GSSG | |
| | | | | | R308K; | | | GSSG | |
| | | | | | E329Q; | | | (SEQ | |
| | | | | | | | | ID | |
| | | | | | | | | NO: | |
| | | | | | | | | 33) | |
| 222 | | | | | hCPN1 | | | | HSA |
| | | | | | (1-398); | | | | |
| 223 | | | | | hCPN1 | | | GSSG | HSA |
| | | | | | (1-398); | | | (SEQ | |
| | | | | | | | | ID | |
| | | | | | | | | NO: | |
| | | | | | | | | 41) | |
| 224 | | | | | hCPN1 | | | GSSG | HSA |
| | | | | | (1-398); | | | GSSG | |
| | | | | | | | | (SEQ | |
| | | | | | | | | ID | |
| | | | | | | | | NO: | |
| | | | | | | | | 42) | |
| 225 | | | | | hCPN1 | | | GSSG | HSA |
| | | | | | (1-398); | | | GSSG | |
| | | | | | | | | GSSG | |
| | | | | | | | | GSSG | |
| | | | | | | | | (SEQ | |
| | | | | | | | | ID | |
| | | | | | | | | NO: | |
| | | | | | | | | 43) | |
| 226 | | | | | hCPN1 | | TEV | | HSA |
| | | | | | (1-398); | | | | |
| 227 | | | | | hCPN1 | | TEV | GSSG | HSA |
| | | | | | (1-398); | | | (SEQ | |
| | | | | | | | | ID | |
| | | | | | | | | NO: | |
| | | | | | | | | 41) | |
| 228 | | | | | hCPN1 | | TEV | GSSG | HSA |
| | | | | | (1-398); | | | GSSG | |
| | | | | | | | | (SEQ | |
| | | | | | | | | ID | |
| | | | | | | | | NO: | |
| | | | | | | | | 42) | |
| 229 | | | | | hCPN1 | | TEV | GSSG | HSA |
| | | | | | (1-398); | | | GSSG | |
| | | | | | | | | GSSG | |
| | | | | | | | | GSSG | |
| | | | | | | | | (SEQ | |
| | | | | | | | | ID | |
| | | | | | | | | NO: | |
| | | | | | | | | 43) | |
| 230 | | | | | hCPN1 | | | GSSG | HSA |
| | | | | | (1-398); | | | GSSG | |
| | | | | | A70V; | | | GSSG | |
| | | | | | P125S; | | | (SEQ | |
| | | | | | | | | ID | |
| | | | | | | | | NO: | |
| | | | | | | | | 33) | |
| 231 | | | | | hCPN1 | | | GSSG | HSA |
| | | | | | (1-398); | | | GSSG | |
| | | | | | P125S; | | | GSSG | |
| | | | | | | | | (SEQ | |
| | | | | | | | | ID | |
| | | | | | | | | NO: | |
| | | | | | | | | 33) | |
| 232 | | | | | hCPN1 | | | GSSG | HSA |
| | | | | | (1-398); | | | GSSG | |
| | | | | | A70V; | | | GSSG | |
| | | | | | P125N; | | | (SEQ | |
| | | | | | | | | ID | |
| | | | | | | | | NO: | |
| | | | | | | | | 33) | |
| 233 | | | | | hCPN1 | | | GSSG | HSA |
| | | | | | (1-398); | | | GSSG | |
| | | | | | A70V; | | | GSSG | |
| | | | | | P125I; | | | (SEQ | |
| | | | | | | | | ID | |
| | | | | | | | | NO: | |
| | | | | | | | | 33) | |
| 234 | | | | | hCPN1 | | | GSSG | HSA |
| | | | | | (1-398); | | | GSSG | |
| | | | | | A70V; | | | GSSG | |
| | | | | | P125F; | | | (SEQ | |
| | | | | | | | | ID | |
| | | | | | | | | NO: | |
| | | | | | | | | 33) | |
| 235 | | | | | hCPN1 | | | GSSG | HSA |
| | | | | | (1-398); | | | GSSG | |
| | | | | | N68D; | | | GSSG | |
| | | | | | A70V; | | | (SEQ | |
| | | | | | | | | ID | |
| | | | | | | | | NO: | |
| | | | | | | | | 33) | |
| 236 | | | | | hCPN1 | | | GSSG | HSA |
| | | | | | (1-398); | | | GSSG | |
| | | | | | N68D; | | | GSSG | |
| | | | | | A70V; | | | (SEQ | |
| | | | | | P125Y; | | | ID | |
| | | | | | | | | NO: | |
| | | | | | | | | 33) | |
| 237 | | | | | hCPN1 | | | GSSG | HSA |
| | | | | | (1-398); | | | GSSG | |
| | | | | | N68D; | | | GSSG | |
| | | | | | P125Y; | | | (SEQ | |
| | | | | | | | | ID | |
| | | | | | | | | NO: | |
| | | | | | | | | 33) | |
| 238 | | | | | hCPN1 | | | GSSG | HSA |
| | | | | | (1-398); | | | GSSG | |
| | | | | | N123D; | | | GSSG | |
| | | | | | K124S; | | | (SEQ | |
| | | | | | P125N; | | | ID | |
| | | | | | V129T; | | | NO: | |
| | | | | | | | | 33) | |
| 239 | | | | | hCPN1 | | | GSSG | HSA |
| | | | | | (1-398); | | | GSSG | |
| | | | | | K124T; | | | GSSG | |
| | | | | | P125S; | | | (SEQ | |
| | | | | | | | | ID | |
| | | | | | | | | NO: | |
| | | | | | | | | 33) | |
| 240 | | | | | hCPN1 | | | GSSG | HSA |
| | | | | | (1-398); | | | GSSG | |
| | | | | | G121D; | | | GSSG | |
| | | | | | P122R; | | | (SEQ | |
| | | | | | N123D; | | | ID | |
| | | | | | K124I; | | | NO: | |
| | | | | | P125S; | | | 33) | |
| 241 | | | | | hCPN1 | | | GSSG | HSA |
| | | | | | (1-398); | | | GSSG | |
| | | | | | N123D; | | | GSSG | |
| | | | | | K124I; | | | (SEQ | |
| | | | | | P125S; | | | ID | |
| | | | | | | | | NO: | |
| | | | | | | | | 33) | |
| 242 | | | | | hCPN1 | | | GSSG | HSA |
| | | | | | (1-398); | | | GSSG | |
| | | | | | N123D; | | | GSSG | |
| | | | | | K124S; | | | (SEQ | |
| | | | | | P125I; | | | ID | |
| | | | | | V129T; | | | NO: | |
| | | | | | | | | 33) | |
| 243 | | | | | hCPN1 | | | GSSG | HSA |
| | | | | | (1-398); | | | GSSG | |
| | | | | | N123D; | | | GSSG | |
| | | | | | K124A; | | | (SEQ | |
| | | | | | P125S; | | | ID | |
| | | | | | | | | NO: | |
| | | | | | | | | 33) | |
| 244 | | | | | hCPN1 | | | GSSG | HSA |
| | | | | | (1-398); | | | GSSG | |
| | | | | | K124A; | | | GSSG | |
| | | | | | P125S; | | | (SEQ | |
| | | | | | | | | ID | |
| | | | | | | | | NO: | |
| | | | | | | | | 33) | |
| 245 | | | | | hCPN1 | | | GSSG | HSA |
| | | | | | (1-398); | | | GSSG | |
| | | | | | N123D; | | | GSSG | |
| | | | | | K124A; | | | (SEQ | |
| | | | | | P125N; | | | ID | |
| | | | | | V129T; | | | NO: | |
| | | | | | | | | 33) | |
| 246 | | | | | hCPN1 | | | GSSG | HSA |
| | | | | | (1-398); | | | GSSG | |
| | | | | | G121E; | | | GSSG | |
| | | | | | P122R; | | | (SEQ | |
| | | | | | N123D; | | | ID | |
| | | | | | K124V; | | | NO: | |
| | | | | | P125S; | | | 33) | |
| 247 | | | | | hCPN1 | | | GSSG | HSA |
| | | | | | (1-398); | | | GSSG | |
| | | | | | N123S; | | | GSSG | |
| | | | | | K124T; | | | (SEQ | |
| | | | | | P125S; | | | ID | |
| | | | | | | | | NO: | |
| | | | | | | | | 33) | |
| 248 | | | | | hCPN1 | | | GSSG | HSA |
| | | | | | (1-398); | | | GSSG | |
| | | | | | K60F; | | | GSSG | |
| | | | | | V62I; | | | (SEQ | |
| | | | | | V180I; | | | ID | |
| | | | | | M184L; | | | NO: | |
| | | | | | | | | 33) | |
| | | | | | S192A; | | | | |
| | | | | | M272L; | | | | |
| | | | | | N276I; | | | | |
| | | | | | E284V; | | | | |
| 249 | | | | | hCPN1 | | | GSSG | HSA |
| | | | | | (1-398); | | | GSSG | |
| | | | | | K60F; | | | GSSG | |
| | | | | | V62A; | | | (SEQ | |
| | | | | | V180F; | | | ID | |
| | | | | | M184L; | | | NO: | |
| | | | | | S192A; | | | 33) | |
| | | | | | M272A; | | | | |
| | | | | | N276V; | | | | |
| | | | | | E284I; | | | | |
| 250 | | | | | hCPN1 | | | GSSG | HSA |
| | | | | | (1-398); | | | GSSG | |
| | | | | | K60F; | | | GSSG | |
| | | | | | V62T; | | | (SEQ | |
| | | | | | V180F; | | | ID | |
| | | | | | S192A; | | | NO: | |
| | | | | | N276V; | | | 33) | |
| | | | | | E284I; | | | | |
| 251 | | | | | hCPN1 | | | GSSG | HSA |
| | | | | | (1-398); | | | GSSG | |
| | | | | | K60G; | | | GSSG | |
| | | | | | V62I; | | | (SEQ | |
| | | | | | V180I; | | | ID | |
| | | | | | S192M; | | | NO: | |
| | | | | | M272L; | | | 33) | |
| | | | | | N276I; | | | | |
| | | | | | E284I; | | | | |
| 252 | | | | | hCPN1 | | | GSSG | HSA |
| | | | | | (1-398); | | | GSSG | |
| | | | | | K60M; | | | GSSG | |
| | | | | | V62I; | | | (SEQ | |
| | | | | | V180I; | | | ID | |
| | | | | | M184F; | | | NO: | |
| | | | | | S192A; | | | 33) | |
| | | | | | M272L; | | | | |
| | | | | | N276L; | | | | |
| | | | | | E284I; | | | | |
| 253 | | | | | hCPN1 | | | GSSG | HSA |
| | | | | | (1-398); | | | GSSG | |
| | | | | | K60F; | | | GSSG | |
| | | | | | V180Y; | | | (SEQ | |
| | | | | | S192A; | | | ID | |
| | | | | | N276T; | | | NO: | |
| | | | | | E284L; | | | 33) | |
| 254 | | | | | hCPN1 | | | GSSG | HSA |
| | | | | | (1-398); | | | GSSG | |
| | | | | | K60F; | | | GSSG | |
| | | | | | V62A; | | | (SEQ | |
| | | | | | V180Y; | | | ID | |
| | | | | | M184L; | | | NO: | |
| | | | | | S192A; | | | 33) | |
| | | | | | M272A; | | | | |
| | | | | | N276T; | | | | |
| | | | | | E284I; | | | | |
| 255 | | | | | hCPN1 | | | GSSG | HSA |
| | | | | | (1-398); | | | GSSG | |
| | | | | | K60F; | | | GSSG | |
| | | | | | V180Y; | | | (SEQ | |
| | | | | | S192A; | | | ID | |
| | | | | | N276T; | | | NO: | |
| | | | | | E284I; | | | 33) | |
| 256 | | | | | hCPN1 | | | GSSG | HSA |
| | | | | | (1-398); | | | GSSG | |
| | | | | | K60Y; | | | GSSG | |
| | | | | | V180Y; | | | (SEQ | |
| | | | | | M184L; | | | ID | |
| | | | | | S192A; | | | NO: | |
| | | | | | M272I; | | | 33) | |
| | | | | | N276T; | | | | |
| | | | | | E284I; | | | | |
| 257 | | | | | hCPN1 | | | GSSG | HSA |
| | | | | | (1-398); | | | GSSG | |
| | | | | | K60F; | | | GSSG | |
| | | | | | V180F; | | | (SEQ | |
| | | | | | S192A; | | | ID | |
| | | | | | N276V; | | | NO: | |
| | | | | | C282T; | | | 33) | |
| | | | | | E284I; | | | | |
| 258 | | | | | hCPN1 | | | GSSG | HSA |
| | | | | | (1-398); | | | GSSG | |
| | | | | | K60A; | | | GSSG | |
| | | | | | V62L; | | | (SEQ | |
| | | | | | M184L; | | | ID | |
| | | | | | S192M; | | | NO: | |
| | | | | | M272L; | | | 33) | |
| | | | | | N276I; | | | | |
| | | | | | C282T; | | | | |
| | | | | | E284V; | | | | |
| 259 | | | | | hCPN1 | | | GSSG | HSA |
| | | | | | (1-398); | | | GSSG | |
| | | | | | K60F; | | | GSSG | |
| | | | | | V62I; | | | (SEQ | |
| | | | | | V180I; | | | ID | |
| | | | | | M184L; | | | NO: | |
| | | | | | S192A; | | | 33) | |
| | | | | | M272L; | | | | |
| | | | | | N276I; | | | | |
| | | | | | C282T; | | | | |
| | | | | | E284I; | | | | |
| 260 | | | | | hCPN1 | | | GSSG | HSA |
| | | | | | (1-398); | | | GSSG | |
| | | | | | K60G; | | | GSSG | |
| | | | | | V180F; | | | (SEQ | |
| | | | | | S192M; | | | ID | |
| | | | | | N276M; | | | NO: | |
| | | | | | C282T; | | | 33) | |
| | | | | | E284V; | | | | |
| 261 | | | | | hCPN1 | | | GSSG | HSA |
| | | | | | (1-398); | | | GSSG | |
| | | | | | K60G; | | | GSSG | |
| | | | | | V62I; | | | (SEQ | |
| | | | | | V180I; | | | ID | |
| | | | | | M184Q; | | | NO: | |
| | | | | | S192Q; | | | 33) | |
| | | | | | N276I; | | | | |
| | | | | | C282S; | | | | |
| | | | | | E284I; | | | | |
| 262 | | | | | hCPN1 | | | GSSG | HSA |
| | | | | | (1-398); | | | GSSG | |
| | | | | | K60F; | | | GSSG | |
| | | | | | S192A; | | | (SEQ | |
| | | | | | N276W; | | | ID | |
| | | | | | E284V; | | | NO: | |
| | | | | | | | | 33) | |
| 263 | | | | | hCPN1 | | | GSSG | HSA |
| | | | | | (1-398); | | | GSSG | |
| | | | | | K60G; | | | GSSG | |
| | | | | | S192M; | | | (SEQ | |
| | | | | | N276W; | | | ID | |
| | | | | | E284V; | | | NO: | |
| | | | | | | | | 33) | |
| 264 | | | | | hCPN1 | | | GSSG | HSA |
| | | | | | (1-398); | | | GSSG | |
| | | | | | K60A; | | | GSSG | |
| | | | | | S192M; | | | (SEQ | |
| | | | | | N276I; | | | ID | |
| | | | | | E284V; | | | NO: | |
| | | | | | | | | 33) | |
| 265 | | | | | hCPN1 | | | GSSG | HSA |
| | | | | | (1-398); | | | GSSG | |
| | | | | | K60F; | | | GSSG | |
| | | | | | S192A; | | | (SEQ | |
| | | | | | N276W; | | | ID | |
| | | | | | C282T; | | | NO: | |
| | | | | | E284V; | | | 33) | |
| 266 | | | | | hCPN1 | | | GSSG | HSA |
| | | | | | (1-398); | | | GSSG | |
| | | | | | K60G; | | | GSSG | |
| | | | | | S192A; | | | (SEQ | |
| | | | | | N276W; | | | ID | |
| | | | | | C282T; | | | NO: | |
| | | | | | E284V; | | | 33) | |
| 267 | | | | | hCPN1 | | | GSSG | HSA |
| | | | | | (1-398); | | | GSSG | |
| | | | | | K60F; | | | GSSG | |
| | | | | | S192A; | | | (SEQ | |
| | | | | | N276W; | | | ID | |
| | | | | | C282L; | | | NO: | |
| | | | | | E284V; | | | 33) | |
| 268 | | | | | hCPN1 | | | GSSG | HSA |
| | | | | | (1-398); | | | GSSG | |
| | | | | | Y266F; | | | GSSG | |
| | | | | | E288Q; | | | (SEQ | |
| | | | | | | | | ID | |
| | | | | | | | | NO: | |
| | | | | | | | | 33) | |
| 269 | | | | | hCPN1 | | TEV | GSSG | HSA |
| | | | | | (1-398); | | | GSSG | |
| | | | | | Y266F; | | | GSSG | |
| | | | | | E288Q; | | | (SEQ | |
| | | | | | | | | ID | |
| | | | | | | | | NO: | |
| | | | | | | | | 33) | |
| 270 | | | | | hCPN1 | | | GSSG | HSA |
| | | | | | (1-398); | | | GSSG | |
| | | | | | W244A; | | | GSSG | |
| | | | | | | | | (SEQ | |
| | | | | | | | | ID | |
| | | | | | | | | NO: | |
| | | | | | | | | 33) | |
| 271 | | | | | hCPN1 | | | GSSG | HSA |
| | | | | | (1-398); | | | GSSG | |
| | | | | | Q247A; | | | GSSG | |
| | | | | | | | | (SEQ | |
| | | | | | | | | ID | |
| | | | | | | | | NO: | |
| | | | | | | | | 33) | |
| 272 | | | | | hCPN1 | | | GSSG | HSA |
| | | | | | (1-398); | | | GSSG | |
| | | | | | W249A; | | | GSSG | |
| | | | | | | | | (SEQ | |
| | | | | | | | | ID | |
| | | | | | | | | NO: | |
| | | | | | | | | 33) | |
| 273 | | | | | hCPN1 | | | GSSG | HSA |
| | | | | | (1-398); | | | GSSG | |
| | | | | | D253A; | | | GSSG | |
| | | | | | | | | (SEQ | |
| | | | | | | | | ID | |
| | | | | | | | | NO: | |
| | | | | | | | | 33) | |
| 274 | | | | | hCPN1 | | | GSSG | HSA |
| | | | | | (1-398); | | | GSSG | |
| | | | | | Y254A; | | | GSSG | |
| | | | | | | | | (SEQ | |
| | | | | | | | | ID | |
| | | | | | | | | NO: | |
| | | | | | | | | 33) | |
| 275 | | | | | hCPN1 | | | GSSG | HSA |
| | | | | | (1-398); | | | GSSG | |
| | | | | | D292A; | | | GSSG | |
| | | | | | | | | (SEQ | |
| | | | | | | | | ID | |
| | | | | | | | | NO: | |
| | | | | | | | | 33) | |
| 276 | | | | | hCPN1 | | | GSSG | HSA |
| | | | | | (1-398); | | | GSSG | |
| | | | | | E298A; | | | GSSG | |
| | | | | | | | | (SEQ | |
| | | | | | | | | ID | |
| | | | | | | | | NO: | |
| | | | | | | | | 33) | |
| 277 | | | | | hCPN1 | | | GSSG | HSA |
| | | | | | (1-398); | | | GSSG | |
| | | | | | E299A; | | | GSSG | |
| | | | | | | | | (SEQ | |
| | | | | | | | | ID | |
| | | | | | | | | NO: | |
| | | | | | | | | 33) | |
| 278 | | | | | hCPN1 | | | GSSG | HSA |
| | | | | | (1-398); | | | GSSG | |
| | | | | | R302A; | | | GSSG | |
| | | | | | | | | (SEQ | |
| | | | | | | | | ID | |
| | | | | | | | | NO: | |
| | | | | | | | | 33) | |
| 279 | | | | | hCPN1 | | | GSSG | HSA |
| | | | | | (1-398); | | | GSSG | |
| | | | | | K293A; | | | GSSG | |
| | | | | | | | | (SEQ | |
| | | | | | | | | ID | |
| | | | | | | | | NO: | |
| | | | | | | | | 33) | |
| 280 | | | | | hCPN1 | | | GSSG | HSA |
| | | | | | (1-398); | | | GSSG | |
| | | | | | P296A; | | | GSSG | |
| | | | | | | | | (SEQ | |
| | | | | | | | | ID | |
| | | | | | | | | NO: | |
| | | | | | | | | 33) | |
| 281 | | | | | hCPN1 | | | GSSG | HSA |
| | | | | | (1-398); | | | GSSG | |
| | | | | | G126A; | | | GSSG | |
| | | | | | | | | (SEQ | |
| | | | | | | | | ID | |
| | | | | | | | | NO: | |
| | | | | | | | | 33) | |
| 282 | | | | | hCPN1 | | | GSSG | HSA |
| | | | | | (1-398); | | | GSSG | |
| | | | | | Y127A; | | | GSSG | |
| | | | | | | | | (SEQ | |
| | | | | | | | | ID | |
| | | | | | | | | NO: | |
| | | | | | | | | 33) | |
| 283 | | | | | hCPN1 | | | GSSG | HSA |
| | | | | | (1-398); | | | GSSG | |
| | | | | | L128A; | | | GSSG | |
| | | | | | | | | (SEQ | |
| | | | | | | | | ID | |
| | | | | | | | | NO: | |
| | | | | | | | | 33) | |
| 284 | | | | | hCPN1 | | | GSSG | HSA |
| | | | | | (1-398); | | | GSSG | |
| | | | | | Q247L; | | | GSSG | |
| | | | | | | | | (SEQ | |
| | | | | | | | | ID | |
| | | | | | | | | NO: | |
| | | | | | | | | 33) | |
| 285 | | | | | hCPN1 | | | GSSG | HSA |
| | | | | | (1-398); | | | GSSG | |
| | | | | | W244K; | | | GSSG | |
| | | | | | Q247L; | | | (SEQ | |
| | | | | | | | | ID | |
| | | | | | | | | NO: | |
| | | | | | | | | 33) | |
| 286 | | | | | hCPN1 | | | GSSG | HSA |
| | | | | | (1-398); | | | GSSG | |
| | | | | | W244L; | | | GSSG | |
| | | | | | Q247M; | | | | |
| | | | | | W249Y; | | | (SEQ | |
| | | | | | | | | ID | |
| | | | | | | | | NO: | |
| | | | | | | | | 33) | |
| 287 | | | | | hCPN1 | | | GSSG | HSA |
| | | | | | (1-398); | | | GSSG | |
| | | | | | W244L; | | | GSSG | |
| | | | | | Q247L; | | | (SEQ | |
| | | | | | W249Y; | | | ID | |
| | | | | | | | | NO: | |
| | | | | | | | | 33) | |
| 288 | | | | | hCPN1 | | | GSSG | HSA |
| | | | | | (1-398); | | | GSSG | |
| | | | | | W244F; | | | GSSG | |
| | | | | | Q247T; | | | (SEQ | |
| | | | | | | | | ID | |
| | | | | | | | | NO: | |
| | | | | | | | | 33 | |
| 289 | | | | | hCPN1 | | | GSSG | HSA |
| | | | | | (1-398); | | | GSSG | |
| | | | | | Q247M; | | | GSSG | |
| | | | | | | | | (SEQ | |
| | | | | | | | | ID | |
| | | | | | | | | NO: | |
| | | | | | | | | 33) | |
| 290 | | | | | hCPN1 | | | GSSG | HSA |
| | | | | | (1-398); | | | GSSG | |
| | | | | | W249Y; | | | GSSG | |
| | | | | | | | | (SEQ | |
| | | | | | | | | ID | |
| | | | | | | | | NO: | |
| | | | | | | | | 33) | |
| 291 | | | | | hCPN1 | | | GSSG | HSA |
| | | | | | (1-398); | | | GSSG | |
| | | | | | W244D; | | | GSSG | |
| | | | | | Q247L; | | | (SEQ | |
| | | | | | | | | ID | |
| | | | | | | | | NO: | |
| | | | | | | | | 33) | |
| 292 | | | | | hCPN1 | | | GSSG | HSA |
| | | | | | (1-398); | | | GSSG | |
| | | | | | Y254R; | | | GSSG | |
| | | | | | | | | (SEQ | |
| | | | | | | | | ID | |
| | | | | | | | | NO: | |
| | | | | | | | | 33) | |
| 293 | | | | | hCPN1 | | | GSSG | HSA |
| | | | | | (1-398); | | | GSSG | |
| | | | | | Q247L; | | | GSSG | |
| | | | | | Y254R; | | | (SEQ | |
| | | | | | | | | ID | |
| | | | | | | | | NO: | |
| | | | | | | | | 33) | |
| 294 | | | | | hCPN1 | | | GSSG | HSA |
| | | | | | (1-398); | | | GSSG | |
| | | | | | W244K; | | | GSSG | |
| | | | | | Q247L; | | | (SEQ | |
| | | | | | D253T; | | | ID | |
| | | | | | | | | NO: | |
| | | | | | | | | 33) | |
| 295 | | | | | hCPN1 | | | GSSG | HSA |
| | | | | | (1-398); | | | GSSG | |
| | | | | | Q247L; | | | GSSG | |
| | | | | | D253T; | | | (SEQ | |
| | | | | | | | | ID | |
| | | | | | | | | NO: | |
| | | | | | | | | 33) | |
| 296 | | | | | hCPN1 | | | GSSG | HSA |
| | | | | | (1-398); | | | GSSG | |
| | | | | | D292L; | | | GSSG | |
| | | | | | | | | (SEQ | |
| | | | | | | | | ID | |
| | | | | | | | | NO: | |
| | | | | | | | | 33) | |
| 297 | | | | | hCPN1 | | | GSSG | HSA |
| | | | | | (1-398); | | | GSSG | |
| | | | | | R302M; | | | GSSG | |
| | | | | | | | | (SEQ | |
| | | | | | | | | ID | |
| | | | | | | | | NO: | |
| | | | | | | | | 33) | |
| 298 | | | | | hCPN1 | | | GSSG | HSA |
| | | | | | (1-398); | | | GSSG | |
| | | | | | R302W; | | | GSSG | |
| | | | | | | | | (SEQ | |
| | | | | | | | | ID | |
| | | | | | | | | NO: | |
| | | | | | | | | 33) | |
| 299 | | | | | hCPN1 | | | GSSG | HSA |
| | | | | | (1-398); | | | GSSG | |
| | | | | | R.302K; | | | GSSG | |
| | | | | | | | | (SEQ | |
| | | | | | | | | ID | |
| | | | | | | | | NO: | |
| | | | | | | | | 33) | |
| 300 | | | | | hCPN1 | | | GSSG | HSA |
| | | | | | (1-398); | | | GSSG | |
| | | | | | R302L; | | | GSSG | |
| | | | | | | | | (SEQ | |
| | | | | | | | | ID | |
| | | | | | | | | NO: | |
| | | | | | | | | 33) | |
| 301 | | | | | hCPN1 | | | GSSG | HSA |
| | | | | | (1-398); | | | GSSG | |
| | | | | | R302Q; | | | GSSG | |
| | | | | | | | | (SEQ | |
| | | | | | | | | ID | |
| | | | | | | | | NO: | |
| | | | | | | | | 33) | |
| 302 | | | | | hCPN1 | | | GSSG | HSA |
| | | | | | (1-398); | | | GSSG | |
| | | | | | K293P; | | | GSSG | |
| | | | | | R302M; | | | (SEQ | |
| | | | | | | | | ID | |
| | | | | | | | | NO: | |
| | | | | | | | | 33) | |
| 303 | | | | | hCPN1 | | | GSSG | HSA |
| | | | | | (1-398); | | | GSSG | |
| | | | | | D292L; | | | GSSG | |
| | | | | | K293A; | | | (SEQ | |
| | | | | | | | | ID | |
| | | | | | | | | NO: | |
| | | | | | | | | 33) | |
| 304 | | | | | hCPN1 | | | GSSG | HSA |
| | | | | | (1-398); | | | GSSG | |
| | | | | | K293Y; | | | GSSG | |
| | | | | | | | | (SEQ | |
| | | | | | | | | ID | |
| | | | | | | | | NO: | |
| | | | | | | | | 33) | |
| 305 | | | | | hCPN1 | | | GSSG | HSA |
| | | | | | (1-398); | | | GSSG | |
| | | | | | K293Y; | | | GSSG | |
| | | | | | P296D; | | | (SEQ | |
| | | | | | | | | ID | |
| | | | | | | | | NO: | |
| | | | | | | | | 33) | |
| 306 | | | | | hCPN1 | | | GSSG | HSA |
| | | | | | (1-398); | | | GSSG | |
| | | | | | K293P; | | | GSSG | |
| | | | | | R302I; | | | (SEQ | |
| | | | | | | | | ID | |
| | | | | | | | | NO: | |
| | | | | | | | | 33) | |
| 307 | | | | | hCPN1 | | | GSSG | HSA |
| | | | | | (1-398); | | | GSSG | |
| | | | | | K293M; | | | GSSG | |
| | | | | | P296D; | | | (SEQ | |
| | | | | | | | | ID | |
| | | | | | | | | NO: | |
| | | | | | | | | 33) | |
| 308 | | | | | hCPN1 | | | GSSG | HSA |
| | | | | | (1-398); | | | GSSG | |
| | | | | | Y127L; | | | GSSG | |
| | | | | | K293P; | | | (SEQ | |
| | | | | | | | | ID | |
| | | | | | | | | NO: | |
| | | | | | | | | 33) | |
| 309 | | | | | hCPN1 | | | GSSG | HSA |
| | | | | | (1-398); | | | GSSG | |
| | | | | | Y127A; | | | GSSG | |
| | | | | | K293Y; | | | (SEQ | |
| | | | | | | | | ID | |
| | | | | | | | | NO: | |
| | | | | | | | | 33) | |
| 310 | | | | | hCPN1 | | | GSSG | HSA |
| | | | | | (1-398); | | | GSSG | |
| | | | | | D292L; | | | GSSG | |
| | | | | | K293A; | | | (SEQ | |
| | | | | | | | | ID | |
| | | | | | | | | NO: | |
| | | | | | | | | 33) | |
| 311 | | | | | hCPN1 | | | GSSG | HSA |
| | | | | | (1-398); | | | GSSG | |
| | | | | | Y127A; | | | GSSG | |
| | | | | | K293M; | | | (SEQ | |
| | | | | | | | | ID | |
| | | | | | | | | NO: | |
| | | | | | | | | 33) | |
| 312 | | | | | hCPN1 | | | GSSG | HSA |
| | | | | | (1-398); | | | GSSG | |
| | | | | | Y127K; | | | GSSG | |
| | | | | | K293P; | | | | |
| | | | | | | | | (SEQ | |
| | | | | | | | | ID | |
| | | | | | | | | NO: | |
| | | | | | | | | 33) | |
| 313 | | | | | hCPN1 | | | GSSG | HSA |
| | | | | | (1-398); | | | GSSG | |
| | | | | | D292V; | | | GSSG | |
| | | | | | K293A; | | | (SEQ | |
| | | | | | | | | ID | |
| | | | | | | | | NO: | |
| | | | | | | | | 33) | |
| 314 | | | | | hCPN1 | | | GSSG | HSA |
| | | | | | (1-398); | | | GSSG | |
| | | | | | K293P; | | | GSSG | |
| | | | | | | | | (SEQ | |
| | | | | | | | | ID | |
| | | | | | | | | NO: | |
| | | | | | | | | 33) | |
| 315 | | | | | hCPN1 | | | GSSG | HSA |
| | | | | | (1-398); | | | GSSG | |
| | | | | | Y127K; | | | GSSG | |
| | | | | | L128D; | | | (SEQ | |
| | | | | | K293Y; | | | ID | |
| | | | | | | | | NO: | |
| | | | | | | | | 33) | |
| 316 | | | | | hCPN1 | | | GSSG | HSA |
| | | | | | (1-398); | | | GSSG | |
| | | | | | Y127L; | | | GSSG | |
| | | | | | L128H; | | | (SEQ | |
| | | | | | K293P; | | | ID | |
| | | | | | | | | NO: | |
| | | | | | | | | 33) | |
| 317 | | | | | hCPN1 | | | GSSG | HSA |
| | | | | | (1-398); | | | GSSG | |
| | | | | | Y127K; | | | GSSG | |
| | | | | | L128H; | | | (SEQ | |
| | | | | | K293P; | | | ID | |
| | | | | | | | | NO: | |
| | | | | | | | | 33) | |
| 318 | | | | | hCPN1 | | | GSSG | HSA |
| | | | | | (1-398); | | | GSSG | |
| | | | | | L128D; | | | GSSG | |
| | | | | | | | | (SEQ | |
| | | | | | | | | ID | |
| | | | | | | | | NO: | |
| | | | | | | | | 33) | |
| 319 | | | | | hCPN1 | | | GSSG | HSA |
| | | | | | (1-398); | | | GSSG | |
| | | | | | C251S; | | | GSSG | |
| | | | | | C291S; | | | (SEQ | |
| | | | | | | | | ID | |
| | | | | | | | | NO: | |
| | | | | | | | | 33) | |
| 320 | | | | | hCPN1 | | | GSSG | HSA |
| | | | | | (1-398); | | | GSSG | |
| | | | | | T223C; | | | GSSG | |
| | | | | | A263C; | | | (SEQ | |
| | | | | | | | | ID | |
| | | | | | | | | NO: | |
| | | | | | | | | 33) | |
| 321 | | | | | hCPN1 | | | GSSG | HSA |
| | | | | | (1-398); | | | GSSG | |
| | | | | | S209C; | | | GSSG | |
| | | | | | A263C; | | | (SEQ | |
| | | | | | | | | ID | |
| | | | | | | | | NO: | |
| | | | | | | | | 33) | |
| 322 | | | | | hCPN1 | | | GSSG | HSA |
| | | | | | (1-398); | | | GSSG | |
| | | | | | S209C; | | | GSSG | |
| | | | | | S267C; | | | (SEQ | |
| | | | | | | | | ID | |
| | | | | | | | | NO: | |
| | | | | | | | | 33) | |
| 323 | | | | | hCPN1 | | | GSSG | HSA |
| | | | | | (1-398); | | | GSSG | |
| | | | | | S267C; | | | GSSG | |
| | | | | | S269C; | | | (SEQ | |
| | | | | | | | | ID | |
| | | | | | | | | NO: | |
| | | | | | | | | 33) | |
| 324 | | | | | hCPN1 | | | GSSG | HSA |
| | | | | | (1-398); | | | GSSG | |
| | | | | | K60F; | | | GSSG | |
| | | | | | V180F; | | | (SEQ | |
| | | | | | S192A; | | | ID | |
| | | | | | T223C; | | | NO: | |
| | | | | | A263C; | | | 33) | |
| | | | | | N276V; | | | | |
| | | | | | E284I; | | | | |
| 325 | | | | | hCPN1 | | | GSSG | HSA |
| | | | | | (1-398); | | | GSSG | |
| | | | | | K60F; | | | GSSG | |
| | | | | | V180F; | | | (SEQ | |
| | | | | | S192A; | | | ID | |
| | | | | | S209C; | | | NO: | |
| | | | | | A263C; | | | 33) | |
| | | | | | N276V; | | | | |
| | | | | | E284I; | | | | |
| 326 | | | | | hCPN1 | | | GSSG | HSA |
| | | | | | (1-398); | | | GSSG | |
| | | | | | K60F; | | | GSSG | |
| | | | | | V180F; | | | (SEQ | |
| | | | | | S192A; | | | ID | |
| | | | | | S209C; | | | NO: | |
| | | | | | S267C; | | | 33) | |
| | | | | | N276V; | | | | |
| | | | | | E284I; | | | | |
| 327 | | | | | hCPN1 | | | GSSG | HSA |
| | | | | | (1-398); | | | GSSG | |
| | | | | | K60F; | | | GSSG | |
| | | | | | V180F; | | | (SEQ | |
| | | | | | S192A; | | | ID | |
| | | | | | S267C; | | | NO: | |
| | | | | | S269C; | | | 33) | |
| | | | | | N276V; | | | | |
| | | | | | E284I; | | | | |
| 328 | | | | | hCPN1 | | | GSSG | HSA |
| | | | | | (1-398); | | | GSSG | |
| | | | | | G121A; | | | GSSG | |
| | | | | | | | | (SEQ | |
| | | | | | | | | ID | |
| | | | | | | | | NO: | |
| | | | | | | | | 33) | |
| 329 | | | | | hCPN1 | | | GSSG | HSA |
| | | | | | (1-398); | | | GSSG | |
| | | | | | P122A; | | | GSSG | |
| | | | | | | | | (SEQ | |
| | | | | | | | | ID | |
| | | | | | | | | NO: | |
| | | | | | | | | 33) | |
| 330 | | | | | hCPN1 | | | GSSG | HSA |
| | | | | | (1-398); | | | GSSG | |
| | | | | | N123A; | | | GSSG | |
| | | | | | | | | (SEQ | |
| | | | | | | | | ID | |
| | | | | | | | | NO: | |
| | | | | | | | | 33) | |
| 331 | | | | | hCPN1 | | | GSSG | HSA |
| | | | | | (1-398); | | | GSSG | |
| | | | | | K124A; | | | GSSG | |
| | | | | | | | | (SEQ | |
| | | | | | | | | ID | |
| | | | | | | | | NO: | |
| | | | | | | | | 33) | |
| 332 | | | | | hCPN1 | | | GSSG | HSA |
| | | | | | (1-398); | | | GSSG | |
| | | | | | P125A; | | | GSSG | |
| | | | | | | | | (SEQ | |
| | | | | | | | | ID | |
| | | | | | | | | NO: | |
| | | | | | | | | 33) | |
| 333 | | | | | hCPN1 | | | GSSG | HSA |
| | | | | | (1-398); | | | GSSG | |
| | | | | | D138A; | | | GSSG | |
| | | | | | | | | (SEQ | |
| | | | | | | | | ID | |
| | | | | | | | | NO: | |
| | | | | | | | | 33) | |
| 334 | | | | | hCPN1 | | | GSSG | HSA |
| | | | | | (1-398); | | | GSSG | |
| | | | | | V180A; | | | GSSG | |
| | | | | | | | | (SEQ | |
| | | | | | | | | ID | |
| | | | | | | | | NO: | |
| | | | | | | | | 33) | |
| 335 | | | | | hCPN1 | | | GSSG | HSA |
| | | | | | (1-398); | | | GSSG | |
| | | | | | F189A; | | | GSSG | |
| | | | | | | | | (SEQ | |
| | | | | | | | | ID | |
| | | | | | | | | NO: | |
| | | | | | | | | 33) | |
| 336 | | | | | hCPN1 | | | GSSG | HSA |
| | | | | | (1-398); | | | GSSG | |
| | | | | | A199A; | | | GSSG | |
| | | | | | | | | (SEQ | |
| | | | | | | | | ID | |
| | | | | | | | | NO: | |
| | | | | | | | | 33) | |
| 337 | | | | | hCPN1 | | | GSSG | HSA |
| | | | | | (1-398); | | | GSSG | |
| | | | | | N276A; | | | GSSG | |
| | | | | | | | | (SEQ | |
| | | | | | | | | ID | |
| | | | | | | | | NO: | |
| | | | | | | | | 33) | |
| 338 | | | | | hCPN1 | | | GSSG | HSA |
| | | | | | (1-398); | | | GSSG | |
| | | | | | E284A; | | | GSSG | |
| | | | | | | | | (SEQ | |
| | | | | | | | | ID | |
| | | | | | | | | NO: | |
| | | | | | | | | 33) | |
| 339 | | | | | hCPN1 | | | GSSG | HSA |
| | | | | | (1-398); | | | GSSG | |
| | | | | | E297A; | | | GSSG | |
| | | | | | | | | (SEQ | |
| | | | | | | | | ID | |
| | | | | | | | | NO: | |
| | | | | | | | | 33) | |
| 340 | | | | | hCPN1 | | | GSSG | HSA |
| | | | | | (1-398); | | | GSSG | |
| | | | | | L300A; | | | GSSG | |
| | | | | | | | | (SEQ | |
| | | | | | | | | ID | |
| | | | | | | | | NO: | |
| | | | | | | | | 33) | |
| 341 | | | | | hCPN1 | | | GSSG | HSA |
| | | | | | (1-398); | | | GSSG | |
| | | | | | Q301A; | | | GSSG | |
| | | | | | | | | (SEQ | |
| | | | | | | | | ID | |
| | | | | | | | | NO: | |
| | | | | | | | | 33) | |
| 342 | | | | | hCPN1 | | | GSSG | HSA |
| | | | | | (1-398); | | | GSSG | |
| | | | | | K60A; | | | GSSG | |
| | | | | | | | | (SEQ | |
| | | | | | | | | ID | |
| | | | | | | | | NO: | |
| | | | | | | | | 33) | |
| 343 | | | | | hCPN1 | | | GSSG | HSA |
| | | | | | (1-398); | | | GSSG | |
| | | | | | H66A; | | | GSSG | |
| | | | | | | | | (SEQ | |
| | | | | | | | | ID | |
| | | | | | | | | NO: | |
| | | | | | | | | 33) | |
| 344 | | | | | hCPN1 | | | GSSG | HSA |
| | | | | | (1-398); | | | GSSG | |
| | | | | | Q78A; | | | GSSG | |
| | | | | | | | | (SEQ | |
| | | | | | | | | ID | |
| | | | | | | | | NO: | |
| | | | | | | | | 33) | |
| 345 | | | | | hCPN1 | | | GSSG | HSA |
| | | | | | (1-398); | | | GSSG | |
| | | | | | K60F; | | | GSSG | |
| | | | | | V180F; | | | (SEQ | |
| | | | | | S192A; | | | ID | |
| | | | | | N276V; | | | NO: | |
| | | | | | E284I; | | | 33) | |
| 346 | | | | | hCPN1 | | | GSSG | HSA |
| | | | | | (1-398); | | | GSSG | |
| | | | | | K60F; | | | GSSG | |
| | | | | | A70V; | | | (SEQ | |
| | | | | | V180F; | | | ID | |
| | | | | | | | | NO: | |
| | | | | | | | | 33) | |
| | | | | | S192A; | | | | |
| | | | | | N276V; | | | | |
| | | | | | E284I | | | | |
| 347 | | | | | hCPN1 | | | GSSG | HSA |
| | | | | | (1-398); | | | GSSG | |
| | | | | | K60F; | | | GSSG | |
| | | | | | N68D; | | | (SEQ | |
| | | | | | P125S; | | | ID | |
| | | | | | V180F; | | | NO: | |
| | | | | | S192A; | | | 33) | |
| | | | | | N276V; | | | | |
| | | | | | E284I | | | | |
| 348 | | | | | hCPN1 | | | GSSG | HSA |
| | | | | | (1-398); | | | GSSG | |
| | | | | | K60F; | | | GSSG | |
| | | | | | N123D; | | | (SEQ | |
| | | | | | K124D; | | | ID | |
| | | | | | P125S; | | | NO: | |
| | | | | | G126Q; | | | 33) | |
| | | | | | V180F; | | | | |
| | | | | | S192A; | | | | |
| | | | | | N276V; | | | | |
| | | | | | E284I | | | | |
| 349 | | | | | hCPN1 | | | GSSG | HSA |
| | | | | | (1-398); | | | GSSG | |
| | | | | | K60F; | | | GSSG | |
| | | | | | G121T; | | | (SEQ | |
| | | | | | P122Y; | | | ID | |
| | | | | | K124Q; | | | NO: | |
| | | | | | P125D; | | | 33) | |
| | | | | | V180F; | | | | |
| | | | | | S192A; | | | | |
| | | | | | N276V; | | | | |
| | | | | | E284I | | | | |
| 350 | | | | | hCPN1 | | | GSSG | HSA |
| | | | | | (1-398); | | | GSSG | |
| | | | | | K60F; | | | GSSG | |
| | | | | | N68D; | | | (SEQ | |
| | | | | | A70V; | | | ID | |
| | | | | | P125S; | | | NO: | |
| | | | | | V180F; | | | 33) | |
| | | | | | S192A; | | | | |
| | | | | | N276V; | | | | |
| | | | | | E284I | | | | |
| 351 | | | | | hCPN1 | | | GSSG | HSA |
| | | | | | (1-398) | | | GSSG | |
| | | | | | | | | (SEQ | |
| | | | | | | | | ID | |
| | | | | | | | | NO: | |
| | | | | | | | | 42) | |
| 352 | | | | | hCPN1 | | | GSSG | HSA |
| | | | | | (1-398); | | | GSSG | |
| | | | | | W244Y; | | | GSSG | |
| | | | | | Q247S; | | | (SEQ | |
| | | | | | | | | ID | |
| | | | | | | | | NO: | |
| | | | | | | | | 33) | |
| 353 | | | | | hCPN1 | | | GSSG | HSA |
| | | | | | (1-398); | | | GSSG | |
| | | | | | W244Y; | | | GSSG | |
| | | | | | Q247L; | | | (SEQ | |
| | | | | | W249L; | | | ID | |
| | | | | | | | | NO: | |
| | | | | | | | | 33) | |
| 354 | | | | | hCPN1 | | | GSSG | HSA |
| | | | | | (1-398); | | | GSSG | |
| | | | | | W244Y; | | | GSSG | |
| | | | | | Q247L; | | | (SEQ | |
| | | | | | W249M; | | | ID | |
| | | | | | | | | NO: | |
| | | | | | | | | 33) | |
| 355 | | | | | hCPN1 | | | GSSG | HSA |
| | | | | | (1-398); | | | GSSG | |
| | | | | | Q247Y; | | | GSSG | |
| | | | | | W249M; | | | (SEQ | |
| | | | | | | | | ID | |
| | | | | | | | | NO: | |
| | | | | | | | | 33) | |
| 356 | | | | | hCPN1 | | | GSSG | HSA |
| | | | | | (1-398); | | | GSSG | |
| | | | | | Q247Y; | | | GSSG | |
| | | | | | | | | (SEQ | |
| | | | | | | | | ID | |
| | | | | | | | | NO: | |
| | | | | | | | | 33) | |
| 357 | | | | | hCPN1 | | | GSSG | HSA |
| | | | | | (1-398); | | | GSSG | |
| | | | | | W244Y; | | | GSSG | |
| | | | | | Q247L; | | | (SEQ | |
| | | | | | W249F; | | | ID | |
| | | | | | | | | NO: | |
| | | | | | | | | 33) | |
| 358 | | | | | hCPN1 | | | GSSG | HSA |
| | | | | | (1-398); | | | GSSG | |
| | | | | | W244Y; | | | GSSG | |
| | | | | | Q247L; | | | (SEQ | |
| | | | | | W249Y; | | | ID | |
| | | | | | | | | NO: | |
| | | | | | | | | 33) | |
| 359 | | | | | hCPN1 | | | GSSG | HSA |
| | | | | | (1-398); | | | GSSG | |
| | | | | | Q247Y; | | | GSSG | |
| | | | | | W249L; | | | (SEQ | |
| | | | | | | | | ID | |
| | | | | | | | | NO: | |
| | | | | | | | | 33) | |
| 360 | | | | | hCPN1 | | | GSSG | HSA |
| | | | | | (1-398); | | | GSSG | |
| | | | | | W244Y; | | | GSSG | |
| | | | | | Q247M; | | | (SEQ | |
| | | | | | W249L; | | | ID | |
| | | | | | | | | NO: | |
| | | | | | | | | 33) | |
| 361 | | | | | hCPN1 | | | GSSG | HSA |
| | | | | | (1-398); | | | GSSG | |
| | | | | | W244D; | | | GSSG | |
| | | | | | Q247F; | | | (SEQ | |
| | | | | | W249H; | | | ID | |
| | | | | | | | | NO: | |
| | | | | | | | | 33) | |
| 362 | | | | | hCPN1 | | | GSSG | HSA |
| | | | | | (1-398); | | | GSSG | |
| | | | | | W244Y; | | | GSSG | |
| | | | | | Q247N; | | | (SEQ | |
| | | | | | W249F; | | | ID | |
| | | | | | | | | NO: | |
| | | | | | | | | 33) | |
| 363 | | | | | hCPN1 | | | GSSG | HSA |
| | | | | | (1-398); | | | GSSG | |
| | | | | | G243E; | | | GSSG | |
| | | | | | W244Y; | | | (SEQ | |
| | | | | | F246Y; | | | ID | |
| | | | | | Q247L; | | | NO: | |
| | | | | | W249Y; | | | 33) | |
| | | | | | N250S; | | | | |
| 364 | | | | | hCPN1 | | | GSSG | HSA |
| | | | | | (1-398); | | | GSSG | |
| | | | | | G243A; | | | GSSG | |
| | | | | | W244Y; | | | (SEQ | |
| | | | | | F246W; | | | ID | |
| | | | | | Q247S; | | | NO: | |
| | | | | | D253L; | | | 33) | |
| 365 | | | | | hCPN1 | | | GSSG | HSA |
| | | | | | (1-398); | | | GSSG | |
| | | | | | G243Y; | | | GSSG | |
| | | | | | W244M; | | | (SEQ | |
| | | | | | F246W; | | | ID | |
| | | | | | Q247S; | | | NO: | |
| | | | | | D253L; | | | 33) | |
| 366 | | | | | hCPN1 | | | GSSG | HSA |
| | | | | | (1-398); | | | GSSG | |
| | | | | | G243A; | | | GSSG | |
| | | | | | W244Y; | | | (SEQ | |
| | | | | | F246W; | | | ID | |
| | | | | | Q247A; | | | NO: | |
| | | | | | D253L; | | | 33) | |
| 367 | | | | | hCPN1 | | | GSSG | HSA |
| | | | | | (1-398); | | | GSSG | |
| | | | | | G243W; | | | GSSG | |
| | | | | | F246Y; | | | (SEQ | |
| | | | | | Q247L; | | | ID | |
| | | | | | N250S; | | | NO: | |
| | | | | | D253N; | | | 33) | |
| 368 | | | | | hCPN1 | | | GSSG | HSA |
| | | | | | (1-398); | | | GSSG | |
| | | | | | G243E; | | | GSSG | |
| | | | | | W244Y; | | | (SEQ | |
| | | | | | F246A; | | | ID | |
| | | | | | W249Y; | | | NO: | |
| | | | | | N250S; | | | 33) | |
| 369 | | | | | hCPN1 | | | GSSG | HSA |
| | | | | | (1-398); | | | GSSG | |
| | | | | | G243Y; | | | GSSG | |
| | | | | | W244I; | | | (SEQ | |
| | | | | | F246W; | | | ID | |
| | | | | | Q247S; | | | NO: | |
| | | | | | D253L; | | | 33) | |
| 370 | | | | | hCPN1 | | | GSSG | HSA |
| | | | | | (1-398); | | | GSSG | |
| | | | | | G243W; | | | GSSG | |
| | | | | | Q247Y; | | | (SEQ | |
| | | | | | N250S; | | | ID | |
| | | | | | D253N; | | | NO: | |
| | | | | | | | | 33) | |
| 371 | | | | | hCPN1 | | | GSSG | HSA |
| | | | | | (1-398); | | | GSSG | |
| | | | | | G243W; | | | GSSG | |
| | | | | | F246W; | | | (SEQ | |
| | | | | | Q247L; | | | ID | |
| | | | | | N250S; | | | NO: | |
| | | | | | D253N; | | | 33) | |
| 372 | | | | | hCPN1 | | | GSSG | HSA |
| | | | | | (1-398); | | | GSSG | |
| | | | | | G243W; | | | GSSG | |
| | | | | | F246L; | | | (SEQ | |
| | | | | | Q247Y; | | | ID | |
| | | | | | W249L; | | | NO: | |
| | | | | | N250S; | | | 33) | |
| | | | | | D253N; | | | | |
| 373 | | | | | hCPN1 | | | GSSG | HSA |
| | | | | | (1-398); | | | GSSG | |
| | | | | | G243W; | | | GSSG | |
| | | | | | W244D; | | | (SEQ | |
| | | | | | F246R; | | | ID | |
| | | | | | Q247F; | | | NO: | |
| | | | | | W249L; | | | 33) | |
| | | | | | N250S; | | | | |
| | | | | | D253N; | | | | |
| 374 | | | | | hCPN1 | | | GSSG | HSA |
| | | | | | (1-398); | | | GSSG | |
| | | | | | G243W; | | | GSSG | |
| | | | | | Q247Y; | | | (SEQ | |
| | | | | | W249L; | | | ID | |
| | | | | | N250S; | | | NO: | |
| | | | | | D253N; | | | 33) | |
| 375 | | | | | hCPN1 | | | GSSG | HSA |
| | | | | | (1-398); | | | GSSG | |
| | | | | | G243W; | | | GSSG | |
| | | | | | F246R; | | | (SEQ | |
| | | | | | Q247F; | | | ID | |
| | | | | | W249L; | | | NO: | |
| | | | | | N250S; | | | 33) | |
| | | | | | D253N; | | | | |
| 376 | | | | | hCPN1 | | | GSSG | HSA |
| | | | | | (1-398); | | | GSSG | |
| | | | | | G243W; | | | GSSG | |
| | | | | | W244D; | | | (SEQ | |
| | | | | | F246W; | | | ID | |
| | | | | | Q247Y; | | | NO: | |
| | | | | | W249F; | | | 33) | |
| | | | | | N250S; | | | | |
| | | | | | D253N; | | | | |
| 377 | | | | | hCPN1 | | | GSSG | HSA |
| | | | | | (1-398); | | | GSSG | |
| | | | | | R302E; | | | GSSG | |
| | | | | | G306A; | | | (SEQ | |
| | | | | | | | | ID | |
| | | | | | | | | NO: | |
| | | | | | | | | 33) | |
| 378 | | | | | hCPN1 | | | GSSG | HSA |
| | | | | | (1-398); | | | GSSG | |
| | | | | | G306Q; | | | GSSG | |
| | | | | | | | | (SEQ | |
| | | | | | | | | ID | |
| | | | | | | | | NO: | |
| | | | | | | | | 33) | |
| 379 | | | | | hCPN1 | | | GSSG | HSA |
| | | | | | (1-398); | | | GSSG | |
| | | | | | R302E; | | | GSSG | |
| | | | | | G306T; | | | (SEQ | |
| | | | | | | | | ID | |
| | | | | | | | | NO: | |
| | | | | | | | | 33) | |
| 380 | | | | | hCPN1 | | | GSSG | HSA |
| | | | | | (1-398); | | | GSSG | |
| | | | | | D292I; | | | GSSG | |
| | | | | | R302L; | | | (SEQ | |
| | | | | | G306H; | | | ID | |
| | | | | | | | | NO: | |
| | | | | | | | | 33) | |
| 381 | | | | | hCPN1 | | | GSSG | HSA |
| | | | | | (1-398); | | | GSSG | |
| | | | | | G306N; | | | GSSG | |
| | | | | | | | | (SEQ | |
| | | | | | | | | ID | |
| | | | | | | | | NO: | |
| | | | | | | | | 33) | |
| 382 | | | | | hCPN1 | | | GSSG | HSA |
| | | | | | (1-398); | | | GSSG | |
| | | | | | D2921; | | | GSSG | |
| | | | | | R302Q; | | | (SEQ | |
| | | | | | G306D; | | | ID | |
| | | | | | | | | NO: | |
| | | | | | | | | 33) | |
| 383 | | | | | hCPN1 | | | GSSG | HSA |
| | | | | | (1-398); | | | GSSG | |
| | | | | | R302E; | | | GSSG | |
| | | | | | G306N; | | | (SEQ | |
| | | | | | | | | ID | |
| | | | | | | | | NO: | |
| | | | | | | | | 33) | |
| 384 | | | | | hCPN1 | | | GSSG | HSA |
| | | | | | (1-398); | | | GSSG | |
| | | | | | D292I; | | | GSSG | |
| | | | | | G306N; | | | (SEQ | |
| | | | | | | | | ID | |
| | | | | | | | | NO: | |
| | | | | | | | | 33) | |
| 385 | | | | | hCPN1 | | | GSSG | HSA |
| | | | | | (1-398); | | | GSSG | |
| | | | | | G306F; | | | GSSG | |
| | | | | | | | | (SEQ | |
| | | | | | | | | ID | |
| | | | | | | | | NO: | |
| | | | | | | | | 33) | |
| 386 | | | | | hCPN1 | | | GSSG | HSA |
| | | | | | (1-398); | | | GSSG | |
| | | | | | D292I; | | | GSSG | |
| | | | | | R302L; | | | (SEQ | |
| | | | | | G306W; | | | ID | |
| | | | | | | | | NO: | |
| | | | | | | | | 33) | |
| 387 | | | | | hCPN1 | | | GSSG | HSA |
| | | | | | (1-398); | | | GSSG | |
| | | | | | D292I; | | | GSSG | |
| | | | | | R302D; | | | (SEQ | |
| | | | | | G306H; | | | ID | |
| | | | | | | | | NO: | |
| | | | | | | | | 33) | |
| 388 | | | | | hCPN1 | | | GSSG | HSA |
| | | | | | (1-398); | | | GSSG | |
| | | | | | D292I; | | | GSSG | |
| | | | | | R302E; | | | (SEQ | |
| | | | | | G306H; | | | ID | |
| | | | | | | | | NO: | |
| | | | | | | | | 33) | |
| 389 | | | | | hCPN1 | | | GSSG | HSA |
| | | | | | (1-398); | | | GSSG | |
| | | | | | Y127E; | | | GSSG | |
| | | | | | L128T; | | | (SEQ | |
| | | | | | | | | ID | |
| | | | | | | | | NO: | |
| | | | | | | | | 33) | |
| 390 | | | | | hCPN1 | | | GSSG | HSA |
| | | | | | (1-398); | | | GSSG | |
| | | | | | Y127L; | | | GSSG | |
| | | | | | L128T; | | | (SEQ | |
| | | | | | | | | ID | |
| | | | | | | | | NO: | |
| | | | | | | | | 33) | |
| 391 | | | | | hCPN1 | | | GSSG | HSA |
| | | | | | (1-398); | | | GSSG | |
| | | | | | Y127T; | | | GSSG | |
| | | | | | L128E; | | | (SEQ | |
| | | | | | | | | ID | |
| | | | | | | | | NO: | |
| | | | | | | | | 33) | |
| 392 | | | | | hCPN1 | | | GSSG | HSA |
| | | | | | (1-398); | | | GSSG | |
| | | | | | Y127T; | | | GSSG | |
| | | | | | L128T; | | | (SEQ | |
| | | | | | | | | ID | |
| | | | | | | | | NO: | |
| | | | | | | | | 33) | |
| 393 | | | | | hCPN1 | | | GSSG | HSA |
| | | | | | (1-398); | | | GSSG | |
| | | | | | Y127R; | | | GSSG | |
| | | | | | L128T; | | | (SEQ | |
| | | | | | | | | ID | |
| | | | | | | | | NO: | |
| | | | | | | | | 33) | |
| 394 | | | | | hCPN1 | | | GSSG | HSA |
| | | | | | (1-398); | | | GSSG | |
| | | | | | Y127L; | | | GSSG | |
| | | | | | L128Y; | | | (SEQ | |
| | | | | | | | | ID | |
| | | | | | | | | NO: | |
| | | | | | | | | 33) | |
| 395 | | | | | hCPN1 | | | GSSG | HSA |
| | | | | | (1-398); | | | GSSG | |
| | | | | | Y127L; | | | GSSG | |
| | | | | | | | | (SEQ | |
| | | | | | | | | ID | |
| | | | | | | | | NO: | |
| | | | | | | | | 33) | |
| 396 | | | | | hCPN1 | | | GSSG | HSA |
| | | | | | (1-398); | | | GSSG | |
| | | | | | Y127D; | | | GSSG | |
| | | | | | L128Y; | | | (SEQ | |
| | | | | | | | | ID | |
| | | | | | | | | NO: | |
| | | | | | | | | 33) | |
| 397 | | | | | hCPN1 | | | GSSG | HSA |
| | | | | | (1-398); | | | GSSG | |
| | | | | | G243A; | | | GSSG | |
| | | | | | | | | (SEQ | |
| | | | | | | | | ID | |
| | | | | | | | | NO: | |
| | | | | | | | | 33) | |
| 398 | | | | | hCPN1 | | | GSSG | HSA |
| | | | | | (1-398); | | | GSSG | |
| | | | | | F246A; | | | GSSG | |
| | | | | | | | | (SEQ | |
| | | | | | | | | ID | |
| | | | | | | | | NO: | |
| | | | | | | | | 33) | |
| 399 | | | | | hCPN1 | | | GSSG | HSA |
| | | | | | (1-398); | | | GSSG | |
| | | | | | N250A; | | | GSSG | |
| | | | | | | | | (SEQ | |
| | | | | | | | | ID | |
| | | | | | | | | NO: | |
| | | | | | | | | 33) | |
| 400 | | | | | hCPN1 | | | GSSG | HSA |
| | | | | | (1-398); | | | GSSG | |
| | | | | | G306A; | | | GSSG | |
| | | | | | | | | (SEQ | |
| | | | | | | | | ID | |
| | | | | | | | | NO: | |
| | | | | | | | | 33) | |
| 401 | | | | | hCPN1 | | | GSSG | HSA |
| | | | | | (1-398); | | | GSSG | |
| | | | | | Y240E; | | | GSSG | |
| | | | | | | | | (SEQ | |
| | | | | | | | | ID | |
| | | | | | | | | NO: | |
| | | | | | | | | 33) | |
| 402 | | | | | hCPN1 | | | GSSG | HSA |
| | | | | | (1-398); | | | GSSG | |
| | | | | | K124E; | | | GSSG | |
| | | | | | | | | (SEQ | |
| | | | | | | | | ID | |
| | | | | | | | | NO: | |
| | | | | | | | | 33) | |
| 403 | | | | | hCPN1 | | | GSSG | HSA |
| | | | | | (1-398); | | | GSSG | |
| | | | | | K293E; | | | GSSG | |
| | | | | | | | | (SEQ | |
| | | | | | | | | ID | |
| | | | | | | | | NO: | |
| | | | | | | | | 33) | |
| 404 | | | | | hCPN1 | | | GSSG | HSA |
| | | | | | (1-398); | | | GSSG | |
| | | | | | K124E; | | | GSSG | |
| | | | | | K293E; | | | (SEQ | |
| | | | | | | | | ID | |
| | | | | | | | | NO: | |
| | | | | | | | | 33) | |
| 405 | | | | | hCPN1 | | | | |
| | | | | | (1-398); | | | | |
| | | | | | A193W; | | | | |
| | | | | | A202V; | | | | |
| | | | | | Y238F; | | | | |
| | | | | | I285L; | | | | |
| | | | | | L287I; | | | | |
| | | | | | L289Y; | | | | |
| | | | | | F314A | | | | |
| 406 | | | | | hCPN1 | | | | |
| | | | | | (1-398); | | | | |
| | | | | | D292I; | | | | |
| | | | | | K293A; | | | | |
| | | | | | F294W | | | | |
| 407 | | | | | hCPN1 | | | | |
| | | | | | (1-398); | | | | |
| | | | | | D292L; | | | | |
| | | | | | K293V; | | | | |
| | | | | | P295L | | | | |
| 408 | | | | | hCPN1 | | | | |
| | | | | | (1-398); | | | | |
| | | | | | N123Y; | | | | |
| | | | | | K124R; | | | | |
| | | | | | Y127E; | | | | |
| | | | | | D292I; | | | | |
| | | | | | K293V; | | | | |
| | | | | | F294M | | | | |
| 409 | | | | | hCPN1 | | | | |
| | | | | | (1-398); | | | | |
| | | | | | G121Q; | | | | |
| | | | | | P122W; | | | | |
| | | | | | N123D; | | | | |
| | | | | | Y127I; | | | | |
| | | | | | D292L; | | | | |
| | | | | | K293A; | | | | |
| | | | | | F294I | | | | |
| 410 | | | | | hCPN1 | | | | |
| | | | | | (1-398); | | | | |
| | | | | | G121D; | | | | |
| | | | | | P122W; | | | | |
| | | | | | N123D; | | | | |
| | | | | | Y127I; | | | | |
| | | | | | D292I; | | | | |
| | | | | | K293A; | | | | |
| | | | | | F294W | | | | |
| 411 | | | | | hCPN1 | | | | |
| | | | | | (1-398); | | | | |
| | | | | | K60F; | | | | |
| | | | | | V62S; | | | | |
| | | | | | V180Y; | | | | |
| | | | | | S192A; | | | | |
| | | | | | N276T; | | | | |
| | | | | | E284I | | | | |
| 412 | | | | | hCPN1 | | | | |
| | | | | | (1-398); | | | | |
| | | | | | K60F; | | | | |
| | | | | | V180F; | | | | |
| | | | | | S192A; | | | | |
| | | | | | N276V; | | | | |
| | | | | | E284I | | | | |
| 413 | | | | | hCPN1 | | | | |
| | | | | | (1-398); | | | | |
| | | | | | K60F; | | | | |
| | | | | | V62M; | | | | |
| | | | | | V180A; | | | | |
| | | | | | S192A; | | | | |
| | | | | | M272F; | | | | |
| | | | | | N276V; | | | | |
| | | | | | E284I | | | | |
| 414 | | | | | hCPN1 | | | | |
| | | | | | (1-320); | | | | |
| | | | | | L55N; | | | | |
| | | | | | H161R; | | | | |
| | | | | | N188D; | | | | |
| | | | | | V190K; | | | | |
| | | | | | K229E; | | | | |
| | | | | | L230W; | | | | |
| | | | | | K233H; | | | | |
| | | | | | N281D; | | | | |
| | | | | | C282S; | | | | |
| | | | | | F283Y; | | | | |
| | | | | | R308K; | | | | |
| | | | | | Q320N | | | | |
| 415 | | | | | hCPN1 | GSSG | HSA | | |
| | | | | | (1-398); | GSSG | | | |
| | | | | | S209G; | GSSG | | | |
| | | | | | ΔF210- | (SEQ | | | |
| | | | | | T220; | ID | | | |
| | | | | | A221R; | NO: | | | |
| | | | | | | 33) | | | |
| 416 | | | | | hCPN1 | GSSG | HSA | | |
| | | | | | (1-398); | GSSG | | | |
| | | | | | S209G; | GSSG | | | |
| | | | | | ΔF210- | (SEQ | | | |
| | | | | | T220; | ID | | | |
| | | | | | A221H; | NO: | | | |
| | | | | | | 33) | | | |
| 417 | | | | | hCPN1 | GSSG | HSA | | |
| | | | | | (1-398); | GSSG | | | |
| | | | | | S209G; | GSSG | | | |
| | | | | | ΔF210- | (SEQ | | | |
| | | | | | R219; | ID | | | |
| | | | | | T220P; | NO: | | | |
| | | | | | A221S; | 33) | | | |
| 418 | | | | | hCPN1 | GSSG | HSA | | |
| | | | | | (1-398); | GSSG | | | |
| | | | | | S209G; | GSSG | | | |
| | | | | | ΔF210- | (SEQ | | | |
| | | | | | R219; | ID | | | |
| | | | | | T220E; | NO: | | | |
| | | | | | A221D; | 33) | | | |
| 419 | | | | | hCPN1 | GSSG | HSA | | |
| | | | | | (1-398); | GSSG | | | |
| | | | | | S209G; | GSSG | | | |
| | | | | | ΔF210- | (SEQ | | | |
| | | | | | R219; | ID | | | |
| | | | | | T220D; | NO: | | | |
| | | | | | A221D; | 33) | | | |
| 420 | | | | | hCPN1 | GSSG | HSA | | |
| | | | | | (1-398); | GSSG | | | |
| | | | | | S209N; | GSSG | | | |
| | | | | | F210W; | (SEQ | | | |
| | | | | | E211G; | ID | | | |
| | | | | | ΔH212- | NO: | | | |
| | | | | | T220; | 33) | | | |
| | | | | | A221G; | | | | |
| 421 | | | | | hCPN1 | GSSG | HSA | | |
| | | | | | (1-398); | GSSG | | | |
| | | | | | S209A; | GSSG | | | |
| | | | | | F210E; | (SEQ | | | |
| | | | | | E211D; | ID | | | |
| | | | | | ΔH212- | NO: | | | |
| | | | | | R219; | 33) | | | |
| | | | | | T220N; | | | | |
| | | | | | A221D; | | | | |
| 422 | | | | | hCPN1 | GSSG | HSA | | |
| | | | | | (1-398); | GSSG | | | |
| | | | | | F210D; | GSSG | | | |
| | | | | | ΔE211- | (SEQ | | | |
| | | | | | R218; | ID | | | |
| | | | | | R219K; | NO: | | | |
| | | | | | T220N; | 33) | | | |
| | | | | | A221D; | | | | |
| 423 | | | | | hCPN1 | GSSG | HSA | | |
| | | | | | (1-398); | GSSG | | | |
| | | | | | F210S; | GSSG | | | |
| | | | | | ΔE211- | (SEQ | | | |
| | | | | | R219; | ID | | | |
| | | | | | A221S; | NO: | | | |
| | | | | | | 33) | | | |
| 424 | | | | | hCPN1 | GSSG | HSA | | |
| | | | | | (1-398); | GSSG | | | |
| | | | | | F210D; | GSSG | | | |
| | | | | | ΔE211- | (SEQ | | | |
| | | | | | R219; | ID | | | |
| | | | | | T220G; | NO: | | | |
| | | | | | A221D; | 33) | | | |
| 425 | | | | | hCPN1 | GSSG | HSA | | |
| | | | | | (1-398); | GSSG | | | |
| | | | | | ΔF210- | GSSG | | | |
| | | | | | R218; | (SEQ | | | |
| | | | | | R219E; | ID | | | |
| | | | | | A221G; | NO: | | | |
| | | | | | | 33) | | | |
| 426 | | | | | hCPN1 | GSSG | HSA | | |
| | | | | | (1-398); | GSSG | | | |
| | | | | | F210D; | GSSG | | | |
| | | | | | ΔE211- | (SEQ | | | |
| | | | | | R219; | ID | | | |
| | | | | | T220S; | NO: | | | |
| | | | | | A221G; | 33) | | | |
| 427 | | | | | hCPN1 | GSSG | HSA | | |
| | | | | | (1-398); | GSSG | | | |
| | | | | | F210E; | GSSG | | | |
| | | | | | E211D; | (SEQ | | | |
| | | | | | ΔH212- | ID | | | |
| | | | | | T220; | NO: | | | |
| | | | | | A221S; | 33) | | | |
| | | | | | S222E; | | | | |

TABLE 3A
Exemplary Modification Strings of hCPN1 (1-398)

| | |
|---|---|
| R37G | G121D; P122H; K124Q |
| K60F; V62S; V180Y; S192A; N276T; E284I | G121I; N123D |
| K60F; V180F; S192A; N276V; E284I | P122W; N123R; K124Y |
| K60F; V62M; V180A; S192A; M272F; N276V; E284I | P122Y; N123R; K124Y |
| K60A; V62L; M184L; S192M; M272L; N276I; E284V | K124Q |
| A193W; A202V; Y238F; I285L; L2871; L289Y; E314A | G121T; P122Y; K124Q; P125D; E297P; E298Q |
| A202V; L287I; L289T | G121T; P122Y; K124Q; P125D; E297P |
| A202I | D292I; K293I; F294W |
| A235L | K293L; E297P; E298Q |
| V1I; F3W; E74L; Q78W | D292L; K293I; P295L |
| V1I; E74L; Q78W | D292L; K293I |
| K60F; V62S; V180Y; S192A; N276T; E284I | D292N; K293A; P295T; E298S |
| K60F; V180F; S192A; N276V; E284I | D292N; K293A; E298S |
| K60F; V62M; V180A; S192A; M272F; N276V; E284I | D292I; K293A; E294W |
| K60A; V62L; M184L; S192M; M272L; N276I; E284V | D292L; K293A; E294W |
| A193W; A202V; Y238F; I285L; L2871; L289Y; E314A | D292L; K293V; E295L |
| A202V; L287I; L289T | D292L; K293V; E298D |
| A202I | K293N |
| A235L | K293L; F294W; E298L |
| V1I; F3W; E74L; Q78W | D292N; K293L; F294W |
| V1I; E74L; Q78W | N123W; K124R; P125A; Y127D; D292I; K293I; |
| A70V | F294Q |
| N68D; P125S | N123Y; K124R; P127E; D292I; K293V; F294M |
| N68D; A70V; P125S | G121T; P122Y; K124Q; P125D; Y127W; D292I; |
| E288Q | K293L; E297P |
| Y266F | N123Y; K124R; Y127D; K293I |
| Y266F; E288Q | G121D; P122S; N123T; K124I; D292N; K293A; E298S |
| A199S | G121Q; P122W; N123D; Y127I; D292L; K293A; |
| K124R; P125S | E294I |
| G121T; P122Y; K124Q; P125D | G121D; P122W; N123D; Y127I; K293A; E294W |
| N123Y; K124R | P122W; N123R; K124H; Y127S; D292L; K293V; |
| G121D; P122D; N123T; K124I | E298W |
| G121D; P122H; K124I | P122W; N123R; K124Y; D292L; K293V; E298D |
| G121R; P122E; N123Y; K124I | K124Q; K293L; F294W; E298L |
| K124D; K293L; F294W; E297D | P122R; |
| P125H | K124I; |
| P125L | G121D; N123D; K124I; |
| P122A; N123D; K124I; P125S | P125S; |
| P122A; N123D; K124S; P125S | P122G; |
| G121E; P122R; N123D; K124I; P125S | K124S; |
| G121D; P122R; N123D; K124T; P125S; G126Q | K124G; |
| N123D; K124D; P125S; G126Q | P125N; |
| N68D | P125G; |
| N68K; K293N | E297Q; |
| V201H | V180F; |
| N203D | S192A; |
| G198D | N276V; |
| G198D; V201Y | E284I; |
| A70V | K60F; |
| N68D; P125S | Y266F; E288Q |
| N68D; A70V; P125S | Y266F; E288Q |
| E288Q | Y266F; E288Q |
| Y266F | CPN1 (1-398) |
| Y266F; E288Q | Y266F; E288Q |
| A199S | A199D; |
| K124R; P125S | G121D; A199D; |
| G121T; P122Y; K124Q; P125D | N123D; A199D; |
| N123Y; K124R | G121D; N123D; A199D; |
| G121D; P122D; N123T; K124I | G121D; N123D; K124I; A199D; |
| G121D; P122H; K124I | H66K; |
| G121R; P122E; N123Y; K124I | Q78E; |
| G121D; P122H; K124Q | P125E; |
| G121I; N123D | P125D; |
| P122W; N123R; K124Y | D138K; |
| P122Y; N123R; K124Y | P296E; |
| K124Q | P296G; |
| G121D; | E298G; |
| N123D; | L300E; |
| G121D; N123D; | Q301R; |
| P122A; | Q301E; |
| R302E; | K60A; V62L; M184L; S192M; M272L; N276I; C282T; |
| D292N; | E284V; |
| F189C; | K60F; V62I; V180I; M184L; S192A; M272L; N276I; |
| R308K; E329Q; | C282T; E284I; |
| A70V; P125S; | K60G; V180F; S192M; N276M; C282T; E284V; |
| P125S; | K60G; V62I; V180I; M184Q; S192Q; N276I; C282S; |
| A70V; P125N; | E284I; |
| A70V; P125I; | K60F; S192A; N276W; E284V; |
| A70V; P125F; | K60G; S192M; N276W; E284V; |
| N68D; A70V; | K60A; S192M; N276I; E284V; |
| N68D; A70V; P125Y; | K60F; S192A; N276W; C282T; E284V; |
| N68D; P125Y; | K60G; S192A; N276W; C282T; E284V; |
| N123D; K124S; P125N; V129T; | K60F; S192A; N276W; C282L; E284V; |
| K124T; P125S; | Y266F; E288Q; |
| G121D; P122R; N123D; K124I; P125S; | Y266F; E288Q; |
| N123D; K124I; P125S; | W244A; |
| N123D; K124S; P125I; V129T; | Q247A; |
| N123D; K124A; P125S; | W249A; |
| K124A; P125S; | D253A; |
| N123D; K124A; P125N; V129T; | Y254A; |
| G121E; P122R; N123D; K124V; P125S; | D292A; |
| N123S; K124T; P125S; | E298A; |
| K60F; V62I; V180I; M184L; S192A; M272L; N276I; | E299A; |
| E284V; | R302A; |
| K60F; V62A; V180F; M184L; S192A; M272A; | K293A; |
| N276V; E284I; | P296A; |
| K60F; V62T; V180F; S192A; N276V; E284I; | G126A; |
| K60G; V62I; V180I; S192M; M272L; N276I; E284I; | Y127A; |
| K60M; V62I; V180I; M184F; S192A; M272L; N276L; | L128A; |
| E284I; | Q247L; |
| K60F; V180Y; S192A; N276T; E284L; | W244K; Q247L; |
| K60F; V62A; V180Y; M184L; S192A; M272A; | W244L; Q247M; W249Y; |
| N276T; E284I; | W244L; Q247L; W249Y; |
| K60F; V180Y; S192A; N276T; E284I; | W244F; Q247T; |
| K60Y; V180Y; M184L; S192A; M272I; N276T; E284I; | Q247M; |
| K60F; V180F; S192A; N276V; C282T; E284I; | W249Y; |
| W244D; Q247L; | K60F; V180F; S192A; S267C; S269C; N276V; E284I; |
| Y254R; | G121A; |
| Q247L; Y254R; | P122A; |
| W244K; Q247L; D253T; | N123A; |
| Q247L; D253T; | K124A; |
| D292L; | P125A; |
| R302M; | D138A; |
| R302W; | V180A; |
| R302K; | F189A; |
| R302L; | A199A; |
| R302Q; | N276A; |
| K293P; R302M; | E284A; |
| D292L; K293A; | E297A; |
| K293Y; | L300A; |
| K293Y; P296D; | Q301A; |
| K293P; R302I; | K60A; |
| K293M; P296D; | H66A; |
| Y127L; K293P; | Q78A; |
| Y127A; K293Y; | K60F; V180F; S192A; N276V; E284I; |
| D292L; K293A; | K60F; A70V; V180F; S192A; N276V; E284I |
| Y127A; K293M; | K60F; N68D; P125S; V180F; S192A; N276V; E284I |
| Y127K; K293P; | K60F; N123D; K124D; P125S; G126Q; V180F; |
| D292V; K293A; | S192A; N276V; E284I |
| K293P; | K60F; G121T; P122Y; K124Q; P125D; V180F; S192A; |
| Y127K; L128D; K293Y; | N276V; E284I |
| Y127L; L128H; K293P; | K60F; N68D; A70V; P125S; V180F; S192A; N276V; |
| Y127K; L128H; K293P; | E284I |
| L128D; | W244Y; Q247S; |
| C251S; C291S; | W244Y; Q247L; W249L; |
| T223C; A263C; | W244Y; Q247L; W249M; |
| S209C; A263C; | Q247Y; W249M; |
| S209C; S267C; | Q247Y; |
| S267C; S269C; | W244Y; Q247L; W249F; |
| K60F; V180F; S192A; T223C; A263C; N276V; E284I; | W244Y; Q247L; W249Y; |
| K60F; V180F; S192A; S209C; A263C; N276V; E284I; | Q247Y; W249L; |
| K60F; V180F; S192A; S209C; S267C; N276V; E284I; | W244Y; Q247M; W249L; |

TABLE 3B
Exemplary Modification Strings of hCPN1 (1-320)

Δ(321-398)
L55N; H161R; N188D; V190K; K229E; L230W; N281D; C282S; F283Y; R308K; Q320N
L55N; H161S; N188D; V190R; K229E; L230W; C282S; F283Y; R308K; Q320N
L55N; H161K; N188D; V190K; K229E; L230W; C282S; F283Y; R308K; Q320N
L55N; H161S; N188D; V190R; K229E; L230K; K233D; C282S; F283Y; R308K; Q320K
L55N; H161R; N188D; V190K; K229E; L230W; K233H; N281D; C282S; F283Y; R308K; Q320N
L55N; H161R; N188D; V190K; K229E; L230K; N281D; C282S; F283Y; R308K; Q320N
L55N; H161R; N188D; V190K; K229E; L230W; N281D; C282S; F283Y; R308K; Q320N
L55N; H161S; N188D; V190R; K229E; L230W; C282S; F283Y; R308K; Q320N
L55N; H161K; N188D; V190K; K229E; L230W; C282S; F283Y; R308K; Q320N
L55N; H161R; N188D; V190K; K229E; L230W; N281D; C282S; F283Y; R308K; Q320N
L55N; H161S; N188D; V190R; K229E; L230W; C282S; F283Y; R308K; Q320N
L55N; H161K; N188D; V190K; K229E; L230W; C282S; F283Y; R308K; Q320N
L55N; H161S; N188D; V190R; K229E; L230K; K233D; C282S; F283Y; R308K; Q320K
L55N; H161R; N188D; V190K; K229E; L230W; K233H; N281D; C282S; F283Y; R308K; Q320N
L55N; H161R; N188D; V190K; K229E; L230K; N281D; C282S; F283Y; R308K; Q320N
L55N; H161R; N188D; V190K; K229E; L230W; K233H; N281D; C282S; F283Y; R308K; Q320N

TABLE 3C
Exemplary Modification Strings of hCPN1 (1-438)

Y266F; E288Q
Y266F; E288Q; 398DDDDK399

TABLE 4A
Exemplary Modifications of hCPN1 (1-398)

| | | | | | | |
|---|---|---|---|---|---|---|
| V1I | V62L | Q78W | P122Y | N123T | K124H | P125A |
| F3W | V62I | Q78E | P122D | N123D | K124D | P125H |
| R37G | V62A | Q78A | P122H | N123R | K124S | P125L |
| K60F | V62T | G121T | P122E | N123W | K124T | P125N |
| K60A | H66K | G121D | P122W | N123S | K124G | P125G |
| K60G | H66A | G121R | P122S | N123A | K124A | P125E |
| K60M | N68D | G121I | P122A | K124R | K124V | P125I |
| K60Y | N68K | G121Q | P122R | K124Q | K124E | P125F |
| V62S | A70V | G121E | P122G | K124I | P125S | P125Y |
| V62M | E74L | G121A | N123Y | K124Y | P125D | G126Q |
| G126A | S192M | F246L | N276T | K293Y | Q301E | A221S |
| Y127D | S192Q | F246R | N276V | K293M | Q301A | T220E |
| P127E | A193W | Q247A | N276I | K293E | R302E | A221D |
| Y127W | G198D | Q247L | N276L | F294W | R302A | T220D |
| Y127I | A199S | Q247M | N276M | E294W | R302M | S209N |
| Y127S | A199D | Q247S | N276W | F294Q | R302W | F210W |
| Y127A | A199A | Q247Y | N276A | F294M | R302K | E211G |
| Y127L | V201H | Q247F | C282T | E294I | R302L | ΔH212- |
| Y127K | V201Y | Q247N | C282S | F294I | R302Q | T220 |
| Y127E | A202V | W249A | C282L | P295L | R302I | A221G |
| Y127T | A202I | W249L | E284I | P295T | R302D | S209A |
| Y127R | N203D | W249M | E284V | E295L | G306A | F210E |
| L128A | S209C | W249F | E284L | P296E | G306Q | E211D |
| L128D | T223C | W249Y | E284A | P296G | G306T | ΔH212- |
| L128H | A235L | W249H | I285L | P296A | G306H | R219 |
| L128T | Y238F | N250S | L287I | P296D | G306N | T220N |
| L128E | Y240E | N250A | E288Q | E297P | G306D | F210D |
| L128Y | G243E | C251S | L289Y | E297D | G306F | ΔE211- |
| V129T | G243A | D253A | L289T | E297Q | G306W | R218 |
| D138K | G243Y | D253T | C291S | E297A | R308K | R219K |
| D138A | G243W | D253L | D292I | E298Q | E314A | F210S |
| V180Y | W244A | D253N | D292L | E298S | F314A | ΔE211- |
| V180F | W244K | Y254A | D292N | E298D | E329Q | R219 |
| V180A | W244L | A263C | D292A | E298L | S209G | T220G |
| V180I | W244Y | Y266F | D292V | E298W | ΔF210- | ΔF210- |
| M184L | W244D | S267C | K293I | E298G | T220 | R218 |
| M184F | W244M | S269C | K293L | E298A | A221R | R219E |
| M184Q | W244I | M272F | K293A | E299A | A221H | T220S |
| F189C | F246Y | M272L | K293V | L300E | ΔF210- | S222E |
| F189A | F246W | M272A | K293N | L300A | R219 | |
| S192A | F246A | M272I | K293P | Q301R | T220P | |

TABLE 4B
Exemplary Modifications of hCPN1 (1-320)

| | | | | | | |
|---|---|---|---|---|---|---|
| L55N | H161S | V190R | L230W | N281D | R308K | Δ(321-398) |
| H161K | N188D | K229E | K233D | C282S | Q320K | |
| H161R | V190K | L230K | K233H | F283Y | Q320N | |

TABLE 4C
Exemplary Modifications of hCPN1 (1-438)

Y266F
E288Q
398DDDDK399 (SEQ ID NO: 44)

TABLE 5
Amino Acid Sequences of Exemplary
Fusion Constructs

| | | Signal | |
|---|---|---|---|
| | | Sequence | Full |
| | | SEQ | Pro- |
| Const. | Signal Sequence | ID | tein |
| No. | (Optional) | (Optional) | SEQ ID |
| 1 | MKWVTFISLLFLFSSAYS | 487 | 73 |
| 2 | MTRLTVLALLAGLLASSRA | 19 | 74 |
| 3 | MYRMQLLSCIALSLALVTNS | 20 | 75 |
| 4 | MGWSLILLFLVAVATRVHS | 21 | 76 |
| 5 | MGWSLILLFLVAVATRVHS | 21 | 77 |
| 6 | MGWSLILLFLVAVATRVHS | 21 | 78 |
| 7 | MGWSLILLFLVAVATRVHS | 21 | 79 |
| 8 | MGWSLILLFLVAVATRVHS | 21 | 80 |
| 9 | MGWSLILLFLVAVATRVHS | 21 | 81 |
| 10 | MGWSLILLFLVAVATRVHS | 21 | 82 |
| 11 | MGWSLILLFLVAVATRVHS | 21 | 83 |
| 12 | MGWSLILLFLVAVATRVHS | 21 | 84 |
| 13 | MGWSLILLFLVAVATRVHS | 21 | 85 |
| 14 | MGWSLILLFLVAVATRVHS | 21 | 86 |
| 15 | MGWSLILLFLVAVATRVHS | 21 | 87 |
| 16 | MGWSLILLFLVAVATRVHS | 21 | 88 |
| 17 | MGWSLILLFLVAVATRVHS | 21 | 89 |
| 18 | MGWSLILLFLVAVATRVHS | 21 | 90 |
| 19 | MGWSLILLFLVAVATRVHS | 21 | 91 |
| 20 | MGWSLILLFLVAVATRVHS | 21 | 92 |
| 21 | MGWSLILLFLVAVATRVHS | 21 | 93 |
| 22 | MGWSLILLFLVAVATRVHS | 21 | 94 |
| 23 | MGWSLILLFLVAVATRVHS | 21 | 95 |
| 24 | MGWSLILLFLVAVATRVHS | 21 | 96 |
| 25 | MGWSLILLFLVAVATRVHS | 21 | 97 |
| 26 | MGWSLILLFLVAVATRVHS | 21 | 98 |
| 27 | MGWSLILLFLVAVATRVHS | 21 | 99 |
| 28 | MGWSLILLFLVAVATRVHS | 21 | 100 |
| 29 | MGWSLILLFLVAVATRVHS | 21 | 101 |
| 30 | MGWSLILLFLVAVATRVHS | 21 | 102 |
| 31 | MGWSLILLFLVAVATRVHS | 21 | 103 |
| 32 | MGWSLILLFLVAVATRVHS | 21 | 104 |
| 33 | MGWSLILLFLVAVATRVHS | 21 | 105 |
| 34 | MGWSLILLFLVAVATRVHS | 21 | 106 |
| 35 | MGWSLILLFLVAVATRVHS | 21 | 107 |
| 36 | MGWSLILLFLVAVATRVHS | 21 | 108 |
| 37 | no signal seq | | 109 |
| 38 | MGWSLILLFLVAVATRVHS | 21 | 110 |
| 39 | MGWSLILLFLVAVATRVHS | 21 | 111 |
| 40 | MGWSLILLFLVAVATRVHS | 21 | 112 |
| 41 | TMGWSLILLFLVAVATRVHS | 488 | 113 |
| 42 | TMGWSLILLFLVAVATRVHS | 488 | 114 |
| 43 | TMGWSLILLFLVAVATRVHS | 488 | 115 |
| 44 | TMGWSLILLFLVAVATRVHS | 488 | 116 |
| 45 | TMGWSLILLFLVAVATRVHS | 488 | 117 |
| 46 | TMGWSLILLFLVAVATRVHS | 488 | 118 |
| 47 | TMGWSLILLFLVAVATRVHS | 488 | 119 |
| 48 | TMGWSLILLFLVAVATRVHS | 488 | 120 |
| 49 | TMGWSLILLFLVAVATRVHS | 488 | 121 |
| 50 | TMGWSLILLFLVAVATRVHS | 488 | 122 |
| 51 | TMGWSLILLFLVAVATRVHS | 488 | 123 |
| 52 | TMGWSLILLFLVAVATRVHS | 488 | 124 |
| 53 | TMGWSLILLFLVAVATRVHS | 488 | 125 |
| 54 | TMGWSLILLFLVAVATRVHS | 488 | 126 |
| 55 | TMGWSLILLFLVAVATRVHS | 488 | 127 |
| 56 | TMGWSLILLFLVAVATRVHS | 488 | 128 |
| 57 | TMGWSLILLFLVAVATRVHS | 488 | 129 |
| 58 | TMGWSLILLFLVAVATRVHS | 488 | 130 |
| 59 | TMGWSLILLFLVAVATRVHS | 488 | 131 |
| 60 | TMGWSLILLFLVAVATRVHS | 488 | 132 |
| 61 | TMGWSLILLFLVAVATRVHS | 488 | 133 |
| 62 | TMGWSLILLFLVAVATRVHS | 488 | 134 |
| 63 | TMGWSLILLFLVAVATRVHS | 488 | 135 |
| 64 | TMGWSLILLFLVAVATRVHS | 488 | 136 |
| 65 | TMGWSLILLFLVAVATRVHS | 488 | 137 |
| 66 | TMGWSLILLFLVAVATRVHS | 488 | 138 |
| 67 | TMGWSLILLFLVAVATRVHS | 488 | 139 |
| 68 | TMGWSLILLFLVAVATRVHS | 488 | 140 |
| 69 | TMGWSLILLFLVAVATRVHS | 488 | 141 |
| 70 | TMGWSLILLFLVAVATRVHS | 488 | 142 |
| 71 | TMGWSLILLFLVAVATRVHS | 488 | 143 |
| 72 | TMGWSLILLFLVAVATRVHS | 488 | 144 |
| 73 | TMGWSLILLFLVAVATRVHS | 488 | 145 |
| 74 | TMGWSLILLFLVAVATRVHS | 488 | 146 |
| 75 | TMGWSLILLFLVAVATRVHS | 488 | 147 |
| 76 | TMGWSLILLFLVAVATRVHS | 488 | 148 |
| 77 | TMGWSLILLFLVAVATRVHS | 488 | 149 |
| 78 | TMGWSLILLFLVAVATRVHS | 488 | 150 |
| 79 | TMGWSLILLFLVAVATRVHS | 488 | 151 |
| 80 | TMGWSLILLFLVAVATRVHS | 488 | 152 |
| 81 | TMGWSLILLFLVAVATRVHS | 488 | 153 |
| 82 | TMGWSLILLFLVAVATRVHS | 488 | 154 |
| 83 | TMGWSLILLFLVAVATRVHS | 488 | 155 |
| 84 | TMGWSLILLFLVAVATRVHS | 488 | 156 |
| 85 | TMGWSLILLFLVAVATRVHS | 488 | 157 |
| 86 | TMGWSLILLFLVAVATRVHS | 488 | 158 |
| 87 | TTTMGWSLILLFLVAVATRVHS | 489 | 159 |
| 88 | TTTMGWSLILLFLVAVATRVHS | 489 | 160 |
| 89 | TTTMGWSLILLFLVAVATRVHS | 489 | 161 |
| 90 | TTTMGWSLILLFLVAVATRVHS | 489 | 162 |
| 91 | TTTMGWSLILLFLVAVATRVHS | 489 | 163 |
| 92 | TTTMGWSLILLFLVAVATRVHS | 489 | 164 |
| 93 | TTTMGWSLILLFLVAVATRVHS | 489 | 165 |
| 94 | TTTMGWSLILLFLVAVATRVHS | 489 | 166 |
| 95 | TTTMGWSLILLFLVAVATRVHS | 489 | 167 |
| 96 | TTTMGWSLILLFLVAVATRVHS | 489 | 168 |
| 97 | TTTMGWSLILLFLVAVATRVHS | 489 | 169 |
| 98 | TTTMGWSLILLFLVAVATRVHS | 489 | 170 |
| 99 | TTTMGWSLILLFLVAVATRVHS | 489 | 171 |
| 100 | TTTMGWSLILLFLVAVATRVHS | 489 | 172 |
| 101 | TTTMGWSLILLFLVAVATRVHS | 489 | 173 |
| 102 | TTTMGWSLILLFLVAVATRVHS | 489 | 174 |
| 103 | TTTMGWSLILLFLVAVATRVHS | 489 | 175 |
| 104 | TTTMGWSLILLFLVAVATRVHS | 489 | 176 |
| 105 | TTTMGWSLILLFLVAVATRVHS | 489 | 177 |
| 106 | TTTMGWSLILLFLVAVATRVHS | 489 | 178 |
| 107 | TTTMGWSLILLFLVAVATRVHS | 489 | 179 |
| 108 | TTTMGWSLILLFLVAVATRVHS | 489 | 180 |
| 109 | TTTMGWSLILLFLVAVATRVHS | 489 | 181 |
| 110 | TTTMGWSLILLFLVAVATRVHS | 489 | 182 |
| 111 | TTTMGWSLILLFLVAVATRVHS | 489 | 183 |
| 112 | TTTMGWSLILLFLVAVATRVHS | 489 | 184 |
| 113 | TTTMGWSLILLFLVAVATRVHS | 489 | 185 |
| 114 | TTTMGWSLILLFLVAVATRVHS | 489 | 186 |
| 115 | TTTMGWSLILLFLVAVATRVHS | 489 | 187 |
| 116 | TTTMGWSLILLFLVAVATRVHS | 489 | 188 |
| 117 | TTTMGWSLILLFLVAVATRVHS | 489 | 189 |
| 118 | TTTMGWSLILLFLVAVATRVHS | 489 | 190 |
| 119 | TTTMGWSLILLFLVAVATRVHS | 489 | 191 |
| 120 | TTTMGWSLILLFLVAVATRVHS | 489 | 192 |
| 121 | TTTMGWSLILLFLVAVATRVHS | 489 | 193 |
| 122 | TTTMGWSLILLFLVAVATRVHS | 489 | 194 |
| 123 | TTTMGWSLILLFLVAVATRVHS | 489 | 195 |
| 124 | TTTMGWSLILLFLVAVATRVHS | 489 | 196 |
| 125 | TTTMGWSLILLFLVAVATRVHS | 489 | 197 |
| 126 | TTTMGWSLILLFLVAVATRVHS | 489 | 198 |
| 127 | TTTMGWSLILLFLVAVATRVHS | 489 | 199 |
| 128 | TTTMGWSLILLFLVAVATRVHS | 489 | 200 |
| 129 | TTTMGWSLILLFLVAVATRVHS | 489 | 201 |
| 130 | TTTMGWSLILLFLVAVATRVHS | 489 | 202 |
| 131 | TTTMGWSLILLFLVAVATRVHS | 489 | 203 |
| 132 | TTTMGWSLILLFLVAVATRVHS | 489 | 204 |
| 133 | TTTMGWSLILLFLVAVATRVHS | 489 | 205 |
| 134 | TTTMGWSLILLFLVAVATRVHS | 489 | 206 |
| 135 | TTTMGWSLILLFLVAVATRVHS | 489 | 207 |
| 136 | TTTMGWSLILLFLVAVATRVHS | 489 | 208 |
| 137 | TTTMGWSLILLFLVAVATRVHS | 489 | 209 |
| 138 | TMGWSLILLFLVAVATRVHS | 488 | 210 |
| 139 | TMGWSLILLFLVAVATRVHS | 488 | 211 |
| 140 | TMGWSLILLFLVAVATRVHS | 488 | 212 |
| 141 | TMGWSLILLFLVAVATRVHS | 488 | 213 |
| 142 | TMGWSLILLFLVAVATRVHS | 488 | 214 |
| 143 | TMGWSLILLFLVAVATRVHS | 488 | 215 |
| 144 | TTTMGWSLILLFLVAVATRVHS | 489 | 216 |
| 145 | TTTMGWSLILLFLVAVATRVHS | 489 | 217 |
| 146 | TTTMGWSLILLFLVAVATRVHS | 489 | 218 |
| 147 | TTTMGWSLILLFLVAVATRVHS | 489 | 219 |
| 148 | TTTMGWSLILLFLVAVATRVHS | 489 | 220 |
| 149 | TTTMGWSLILLFLVAVATRVHS | 489 | 221 |
| 150 | TTTMGWSLILLFLVAVATRVHS | 489 | 222 |
| 151 | TTTMGWSLILLFLVAVATRVHS | 489 | 223 |
| 152 | TTTMGWSLILLFLVAVATRVHS | 489 | 224 |
| 153 | TTTMGWSLILLFLVAVATRVHS | 489 | 225 |
| 154 | TTTMGWSLILLFLVAVATRVHS | 489 | 226 |
| 155 | TTTMGWSLILLFLVAVATRVHS | 489 | 227 |
| 156 | TTTMGWSLILLFLVAVATRVHS | 489 | 228 |
| 157 | TTTMGWSLILLFLVAVATRVHS | 489 | 229 |
| 158 | TTTMGWSLILLFLVAVATRVHS | 489 | 230 |
| 159 | AATMGWSLILLFLVAVATRVHS | 486 | 231 |
| 160 | AATMGWSLILLFLVAVATRVHS | 486 | 232 |
| 161 | AATMGWSLILLFLVAVATRVHS | 486 | 233 |
| 162 | AATMGWSLILLFLVAVATRVHS | 486 | 234 |
| 163 | AATMGWSLILLFLVAVATRVHS | 486 | 235 |
| 164 | AATMGWSLILLFLVAVATRVHS | 486 | 236 |
| 165 | AATMGWSLILLFLVAVATRVHS | 486 | 237 |
| 166 | AATMGWSLILLFLVAVATRVHS | 486 | 238 |
| 167 | AATMGWSLILLFLVAVATRVHS | 486 | 239 |
| 168 | AATMGWSLILLFLVAVATRVHS | 486 | 240 |
| 169 | AATMGWSLILLFLVAVATRVHS | 486 | 241 |
| 170 | AATMGWSLILLFLVAVATRVHS | 486 | 242 |
| 171 | AATMGWSLILLFLVAVATRVHS | 486 | 243 |
| 172 | AATMGWSLILLFLVAVATRVHS | 486 | 244 |
| 173 | AATMGWSLILLFLVAVATRVHS | 486 | 245 |
| 174 | AATMGWSLILLFLVAVATRVHS | 486 | 246 |
| 175 | AATMGWSLILLFLVAVATRVHS | 486 | 247 |
| 176 | AATMGWSLILLFLVAVATRVHS | 486 | 248 |
| 177 | AATMGWSLILLFLVAVATRVHS | 486 | 249 |
| 178 | AATMGWSLILLFLVAVATRVHS | 486 | 250 |
| 179 | AATMGWSLILLFLVAVATRVHS | 486 | 251 |
| 180 | AATMGWSLILLFLVAVATRVHS | 486 | 252 |
| 181 | AATMGWSLILLFLVAVATRVHS | 486 | 253 |
| 182 | AATMGWSLILLFLVAVATRVHS | 486 | 254 |
| 183 | AATMGWSLILLFLVAVATRVHS | 486 | 255 |
| 184 | AATMGWSLILLFLVAVATRVHS | 486 | 256 |
| 185 | AATMGWSLILLFLVAVATRVHS | 486 | 257 |
| 186 | AATMGWSLILLFLVAVATRVHS | 486 | 258 |
| 187 | AATMGWSLILLFLVAVATRVHS | 486 | 259 |
| 188 | AATMGWSLILLFLVAVATRVHS | 486 | 260 |
| 189 | AATMGWSLILLFLVAVATRVHS | 486 | 261 |
| 190 | AATMGWSLILLFLVAVATRVHS | 486 | 262 |
| 191 | AATMGWSLILLFLVAVATRVHS | 486 | 263 |
| 192 | AATMGWSLILLFLVAVATRVHS | 486 | 264 |
| 193 | AATMGWSLILLFLVAVATRVHS | 486 | 265 |
| 194 | AATMGWSLILLFLVAVATRVHS | 486 | 266 |
| 195 | AATMGWSLILLFLVAVATRVHS | 486 | 267 |
| 196 | AATMGWSLILLFLVAVATRVHS | 486 | 268 |
| 197 | AATMGWSLILLFLVAVATRVHS | 486 | 269 |
| 198 | AATMGWSLILLFLVAVATRVHS | 486 | 270 |
| 199 | AATMGWSLILLFLVAVATRVHS | 486 | 271 |
| 200 | AATMGWSLILLFLVAVATRVHS | 486 | 272 |
| 201 | AATMGWSLILLFLVAVATRVHS | 486 | 273 |
| 202 | AATMGWSLILLFLVAVATRVHS | 486 | 274 |
| 203 | AATMGWSLILLFLVAVATRVHS | 486 | 275 |
| 204 | AATMGWSLILLFLVAVATRVHS | 486 | 276 |
| 205 | AATMGWSLILLFLVAVATRVHS | 486 | 277 |
| 206 | AATMGWSLILLFLVAVATRVHS | 486 | 278 |
| 207 | AATMGWSLILLFLVAVATRVHS | 486 | 279 |
| 208 | AATMGWSLILLFLVAVATRVHS | 486 | 280 |
| 209 | AATMGWSLILLFLVAVATRVHS | 486 | 281 |
| 210 | AATMGWSLILLFLVAVATRVHS | 486 | 282 |
| 211 | AATMGWSLILLFLVAVATRVHS | 486 | 283 |
| 212 | AATMGWSLILLFLVAVATRVHS | 486 | 284 |
| 213 | AATMGWSLILLFLVAVATRVHS | 486 | 285 |
| 214 | AATMGWSLILLFLVAVATRVHS | 486 | 286 |
| 215 | GSATMETDTLLLWVLLLWVPGSTG | 490 | 287 |
| 216 | AATMGWSLILLFLVAVATRVHS | 486 | 288 |
| 217 | AATMGWSLILLFLVAVATRVHS | 486 | 289 |
| 218 | AATMGWSLILLFLVAVATRVHS | 486 | 290 |
| 219 | AATMGWSLILLFLVAVATRVHS | 486 | 291 |
| 220 | AATMGWSLILLFLVAVATRVHS | 486 | 292 |
| 22 | AATMGWSLILLFLVAVATRVHS | 486 | 293 |
| 222 | AATMGWSLILLFLVAVATRVHS | 486 | 294 |
| 223 | AATMGWSLILLFLVAVATRVHS | 486 | 295 |
| 224 | AATMGWSLILLFLVAVATRVHS | 486 | 296 |
| 225 | AATMGWSLILLFLVAVATRVHS | 486 | 297 |
| 226 | AATMGWSLILLFLVAVATRVHS | 486 | 298 |
| 227 | AATMGWSLILLFLVAVATRVHS | 486 | 299 |
| 228 | AATMGWSLILLFLVAVATRVHS | 486 | 300 |
| 229 | AATMGWSLILLFLVAVATRVHS | 486 | 301 |
| 230 | AATMGWSLILLFLVAVATRVHS | 486 | 302 |
| 231 | AATMGWSLILLFLVAVATRVHS | 486 | 303 |
| 232 | AATMGWSLILLFLVAVATRVHS | 486 | 304 |
| 233 | AATMGWSLILLFLVAVATRVHS | 486 | 305 |
| 234 | AATMGWSLILLFLVAVATRVHS | 486 | 306 |
| 235 | AATMGWSLILLFLVAVATRVHS | 486 | 307 |
| 236 | AATMGWSLILLFLVAVATRVHS | 486 | 308 |
| 237 | AATMGWSLILLFLVAVATRVHS | 486 | 309 |
| 238 | AATMGWSLILLFLVAVATRVHS | 486 | 310 |
| 239 | AATMGWSLILLFLVAVATRVHS | 486 | 311 |
| 240 | AATMGWSLILLFLVAVATRVHS | 486 | 312 |
| 241 | AATMGWSLILLFLVAVATRVHS | 486 | 313 |
| 242 | AATMGWSLILLFLVAVATRVHS | 486 | 314 |
| 243 | AATMGWSLILLFLVAVATRVHS | 486 | 315 |
| 244 | AATMGWSLILLFLVAVATRVHS | 486 | 316 |
| 245 | AATMGWSLILLFLVAVATRVHS | 486 | 317 |
| 246 | AATMGWSLILLFLVAVATRVHS | 486 | 318 |
| 247 | AATMGWSLILLFLVAVATRVHS | 486 | 319 |
| 248 | AATMGWSLILLFLVAVATRVHS | 486 | 320 |
| 249 | AATMGWSLILLFLVAVATRVHS | 486 | 321 |
| 250 | AATMGWSLILLFLVAVATRVHS | 486 | 322 |
| 251 | AATMGWSLILLFLVAVATRVHS | 486 | 323 |
| 252 | AATMGWSLILLFLVAVATRVHS | 486 | 324 |
| 253 | AATMGWSLILLFLVAVATRVHS | 486 | 325 |
| 254 | AATMGWSLILLFLVAVATRVHS | 486 | 326 |
| 255 | AATMGWSLILLFLVAVATRVHS | 486 | 327 |
| 256 | AATMGWSLILLFLVAVATRVHS | 486 | 328 |
| 257 | AATMGWSLILLFLVAVATRVHS | 486 | 329 |
| 258 | AATMGWSLILLFLVAVATRVHS | 486 | 330 |
| 259 | AATMGWSLILLFLVAVATRVHS | 486 | 331 |
| 260 | AATMGWSLILLFLVAVATRVHS | 486 | 332 |
| 261 | AATMGWSLILLFLVAVATRVHS | 486 | 333 |
| 262 | AATMGWSLILLFLVAVATRVHS | 486 | 334 |
| 263 | AATMGWSLILLFLVAVATRVHS | 486 | 335 |
| 264 | AATMGWSLILLFLVAVATRVHS | 486 | 336 |
| 265 | AATMGWSLILLFLVAVATRVHS | 486 | 337 |
| 266 | AATMGWSLILLFLVAVATRVHS | 486 | 338 |
| 267 | AATMGWSLILLFLVAVATRVHS | 486 | 339 |
| 268 | AATMGWSLILLFLVAVATRVHS | 486 | 340 |
| 269 | AATMGWSLILLFLVAVATRVHS | 486 | 341 |
| 270 | AATMGWSLILLFLVAVATRVHS | 486 | 342 |
| 271 | AATMGWSLILLFLVAVATRVHS | 486 | 343 |
| 272 | AATMGWSLILLFLVAVATRVHS | 486 | 344 |
| 273 | AATMGWSLILLFLVAVATRVHS | 486 | 345 |
| 274 | AATMGWSLILLFLVAVATRVHS | 486 | 346 |
| 275 | AATMGWSLILLFLVAVATRVHS | 486 | 347 |
| 276 | AATMGWSLILLFLVAVATRVHS | 486 | 348 |
| 277 | AATMGWSLILLFLVAVATRVHS | 486 | 349 |
| 278 | AATMGWSLILLFLVAVATRVHS | 486 | 350 |
| 279 | AATMGWSLILLFLVAVATRVHS | 486 | 351 |
| 280 | AATMGWSLILLFLVAVATRVHS | 486 | 352 |
| 281 | AATMGWSLILLFLVAVATRVHS | 486 | 353 |
| 282 | AATMGWSLILLFLVAVATRVHS | 486 | 354 |
| 283 | AATMGWSLILLFLVAVATRVHS | 486 | 355 |
| 284 | AATMGWSLILLFLVAVATRVHS | 486 | 356 |
| 285 | AATMGWSLILLFLVAVATRVHS | 486 | 357 |
| 286 | AATMGWSLILLFLVAVATRVHS | 486 | 358 |
| 287 | AATMGWSLILLFLVAVATRVHS | 486 | 359 |
| 288 | AATMGWSLILLFLVAVATRVHS | 486 | 360 |
| 289 | AATMGWSLILLFLVAVATRVHS | 486 | 361 |
| 290 | AATMGWSLILLFLVAVATRVHS | 486 | 362 |
| 291 | AATMGWSLILLFLVAVATRVHS | 486 | 363 |
| 292 | AATMGWSLILLFLVAVATRVHS | 486 | 364 |
| 293 | AATMGWSLILLFLVAVATRVHS | 486 | 365 |
| 294 | AATMGWSLILLFLVAVATRVHS | 486 | 366 |
| 295 | AATMGWSLILLFLVAVATRVHS | 486 | 367 |
| 296 | AATMGWSLILLFLVAVATRVHS | 486 | 368 |
| 297 | AATMGWSLILLFLVAVATRVHS | 486 | 369 |
| 298 | AATMGWSLILLFLVAVATRVHS | 486 | 370 |
| 299 | AATMGWSLILLFLVAVATRVHS | 486 | 371 |
| 300 | AATMGWSLILLFLVAVATRVHS | 486 | 372 |
| 301 | AATMGWSLILLFLVAVATRVHS | 486 | 373 |
| 302 | AATMGWSLILLFLVAVATRVHS | 486 | 374 |
| 303 | AATMGWSLILLFLVAVATRVHS | 486 | 375 |
| 304 | AATMGWSLILLFLVAVATRVHS | 486 | 376 |
| 305 | AATMGWSLILLFLVAVATRVHS | 486 | 377 |
| 306 | AATMGWSLILLFLVAVATRVHS | 486 | 378 |
| 307 | AATMGWSLILLFLVAVATRVHS | 486 | 379 |
| 308 | AATMGWSLILLFLVAVATRVHS | 486 | 380 |
| 309 | AATMGWSLILLFLVAVATRVHS | 486 | 381 |
| 310 | AATMGWSLILLFLVAVATRVHS | 486 | 382 |
| 311 | AATMGWSLILLFLVAVATRVHS | 486 | 383 |
| 312 | AATMGWSLILLFLVAVATRVHS | 486 | 384 |
| 313 | AATMGWSLILLFLVAVATRVHS | 486 | 385 |
| 314 | AATMGWSLILLFLVAVATRVHS | 486 | 386 |
| 315 | AATMGWSLILLFLVAVATRVHS | 486 | 387 |
| 316 | AATMGWSLILLFLVAVATRVHS | 486 | 388 |
| 317 | AATMGWSLILLFLVAVATRVHS | 486 | 389 |
| 318 | AATMGWSLILLFLVAVATRVHS | 486 | 390 |
| 319 | AATMGWSLILLFLVAVATRVHS | 486 | 391 |
| 320 | AATMGWSLILLFLVAVATRVHS | 486 | 392 |
| 321 | AATMGWSLILLFLVAVATRVHS | 486 | 393 |
| 322 | AATMGWSLILLFLVAVATRVHS | 486 | 394 |
| 323 | AATMGWSLILLFLVAVATRVHS | 486 | 395 |
| 324 | AATMGWSLILLFLVAVATRVHS | 486 | 396 |
| 325 | AATMGWSLILLFLVAVATRVHS | 486 | 397 |
| 326 | AATMGWSLILLFLVAVATRVHS | 486 | 398 |
| 327 | AATMGWSLILLFLVAVATRVHS | 486 | 399 |
| 328 | AATMGWSLILLFLVAVATRVHS | 486 | 400 |
| 329 | AATMGWSLILLFLVAVATRVHS | 486 | 401 |
| 330 | AATMGWSLILLFLVAVATRVHS | 486 | 402 |
| 331 | AATMGWSLILLFLVAVATRVHS | 486 | 403 |
| 332 | AATMGWSLILLFLVAVATRVHS | 486 | 404 |
| 333 | AATMGWSLILLFLVAVATRVHS | 486 | 405 |
| 334 | AATMGWSLILLFLVAVATRVHS | 486 | 406 |
| 335 | AATMGWSLILLFLVAVATRVHS | 486 | 407 |
| 336 | AATMGWSLILLFLVAVATRVHS | 486 | 408 |
| 337 | AATMGWSLILLFLVAVATRVHS | 486 | 409 |
| 338 | AATMGWSLILLFLVAVATRVHS | 486 | 410 |
| 339 | AATMGWSLILLFLVAVATRVHS | 486 | 411 |
| 340 | AATMGWSLILLFLVAVATRVHS | 486 | 412 |
| 341 | AATMGWSLILLFLVAVATRVHS | 486 | 413 |
| 342 | AATMGWSLILLFLVAVATRVHS | 486 | 414 |
| 343 | AATMGWSLILLFLVAVATRVHS | 486 | 415 |
| 344 | AATMGWSLILLFLVAVATRVHS | 486 | 416 |
| 345 | AATMGWSLILLFLVAVATRVHS | 486 | 417 |
| 346 | AATMGWSLILLFLVAVATRVHS | 486 | 418 |
| 347 | AATMGWSLILLFLVAVATRVHS | 486 | 419 |
| 348 | AATMGWSLILLFLVAVATRVHS | 486 | 420 |
| 349 | AATMGWSLILLFLVAVATRVHS | 486 | 421 |
| 350 | AATMGWSLILLFLVAVATRVHS | 486 | 422 |
| 351 | AATMGWSLILLFLVAVATRVHS | 486 | 423 |
| 352 | AATMGWSLILLFLVAVATRVHS | 486 | 424 |
| 353 | AATMGWSLILLFLVAVATRVHS | 486 | 425 |
| 354 | AATMGWSLILLFLVAVATRVHS | 486 | 426 |
| 355 | AATMGWSLILLFLVAVATRVHS | 486 | 427 |
| 356 | AATMGWSLILLFLVAVATRVHS | 486 | 428 |
| 357 | AATMGWSLILLFLVAVATRVHS | 486 | 429 |
| 358 | AATMGWSLILLFLVAVATRVHS | 486 | 430 |
| 359 | AATMGWSLILLFLVAVATRVHS | 486 | 431 |
| 360 | AATMGWSLILLFLVAVATRVHS | 486 | 432 |
| 361 | AATMGWSLILLFLVAVATRVHS | 486 | 433 |
| 362 | AATMGWSLILLFLVAVATRVHS | 486 | 434 |
| 363 | AATMGWSLILLFLVAVATRVHS | 486 | 435 |
| 364 | AATMGWSLILLFLVAVATRVHS | 486 | 436 |
| 365 | AATMGWSLILLFLVAVATRVHS | 486 | 437 |
| 366 | AATMGWSLILLFLVAVATRVHS | 486 | 438 |
| 367 | AATMGWSLILLFLVAVATRVHS | 486 | 439 |
| 368 | AATMGWSLILLFLVAVATRVHS | 486 | 440 |
| 369 | AATMGWSLILLFLVAVATRVHS | 486 | 441 |
| 370 | AATMGWSLILLFLVAVATRVHS | 486 | 442 |
| 371 | AATMGWSLILLFLVAVATRVHS | 486 | 443 |
| 372 | AATMGWSLILLFLVAVATRVHS | 486 | 444 |
| 373 | AATMGWSLILLFLVAVATRVHS | 486 | 445 |
| 374 | AATMGWSLILLFLVAVATRVHS | 486 | 446 |
| 375 | AATMGWSLILLFLVAVATRVHS | 486 | 447 |
| 376 | AATMGWSLILLFLVAVATRVHS | 486 | 448 |
| 377 | AATMGWSLILLFLVAVATRVHS | 486 | 449 |
| 378 | AATMGWSLILLFLVAVATRVHS | 486 | 450 |
| 379 | AATMGWSLILLFLVAVATRVHS | 486 | 451 |
| 380 | AATMGWSLILLFLVAVATRVHS | 486 | 452 |
| 381 | AATMGWSLILLFLVAVATRVHS | 486 | 453 |
| 382 | AATMGWSLILLFLVAVATRVHS | 486 | 454 |
| 383 | AATMGWSLILLFLVAVATRVHS | 486 | 455 |
| 384 | AATMGWSLILLFLVAVATRVHS | 486 | 456 |
| 385 | AATMGWSLILLFLVAVATRVHS | 486 | 457 |
| 386 | AATMGWSLILLFLVAVATRVHS | 486 | 458 |
| 387 | AATMGWSLILLFLVAVATRVHS | 486 | 459 |
| 388 | AATMGWSLILLFLVAVATRVHS | 486 | 460 |
| 389 | AATMGWSLILLFLVAVATRVHS | 486 | 461 |
| 390 | AATMGWSLILLFLVAVATRVHS | 486 | 462 |
| 391 | AATMGWSLILLFLVAVATRVHS | 486 | 463 |
| 392 | AATMGWSLILLFLVAVATRVHS | 486 | 464 |
| 393 | AATMGWSLILLFLVAVATRVHS | 486 | 465 |
| 394 | AATMGWSLILLFLVAVATRVHS | 486 | 466 |
| 395 | AATMGWSLILLFLVAVATRVHS | 486 | 467 |
| 396 | AATMGWSLILLFLVAVATRVHS | 486 | 468 |
| 397 | AATMGWSLILLFLVAVATRVHS | 486 | 469 |
| 398 | AATMGWSLILLFLVAVATRVHS | 486 | 470 |
| 399 | AATMGWSLILLFLVAVATRVHS | 486 | 471 |
| 400 | AATMGWSLILLFLVAVATRVHS | 486 | 472 |
| 415 | AATMGWSLILLFLVAVATRVHS | 486 | 473 |
| 416 | AATMGWSLILLFLVAVATRVHS | 486 | 474 |
| 417 | AATMGWSLILLFLVAVATRVHS | 486 | 475 |
| 418 | AATMGWSLILLFLVAVATRVHS | 486 | 476 |
| 419 | AATMGWSLILLFLVAVATRVHS | 486 | 477 |
| 420 | AATMGWSLILLFLVAVATRVHS | 486 | 478 |
| 421 | AATMGWSLILLFLVAVATRVHS | 486 | 479 |
| 422 | AATMGWSLILLFLVAVATRVHS | 486 | 480 |
| 423 | AATMGWSLILLFLVAVATRVHS | 486 | 481 |
| 424 | AATMGWSLILLFLVAVATRVHS | 486 | 482 |
| 425 | AATMGWSLILLFLVAVATRVHS | 486 | 483 |
| 426 | AATMGWSLILLFLVAVATRVHS | 486 | 484 |
| 427 | AATMGWSLILLFLVAVATRVHS | 486 | 485 |

[0127] The present description sets forth numerous exemplary configurations, methods, parameters, and the like. It should be recognized, however, that such description is not intended as a limitation on the scope of the present disclosure, but is instead provided as a description of exemplary embodiments. Embodiments of the present subject matter described above may be beneficial alone or in combination, with one or more other aspects or embodiments. Without limiting the foregoing description, certain non-limiting embodiments of the disclosure are provided below. As will be apparent to those of skill in the art upon reading this disclosure, each of the individually numbered embodiments may be used or combined with any of the preceding or following individually numbered embodiments. This is intended to provide support for all such combinations of embodiments and is not limited to combinations of embodiments explicitly provided below.

[0128] The following Enumerated Embodiments and Examples are merely illustrative and are not meant to limit any aspects of the present disclosure in any way.

### ENUMERATED EMBODIMENTS

### Set I

[0129] Embodiment I-1. A variant of a carboxypeptidase N (CPN) comprising at least one modification with respect to a wild type CPN, wherein the variant has at least one improved characteristic as compared to the wild type CPN.
[0130] Embodiment I-2. The variant of embodiment I-1, wherein the improved characteristic is selected from an increase or a decrease in any one or more of: half-life, activity, potency, affinity for one or more substrates, sensitivity, cofactor affinity, catalytic capability, and selectivity.
[0131] Embodiment I-3. The variant of embodiment I-2, wherein the at least one improved characteristic comprises an increase in affinity for one or more substrates, and wherein at least one substrate is C3a.
[0132] Embodiment I-4. The variant of any one of embodiments I-2 to I-3, wherein the at least one improved characteristic comprises an increase in affinity for one or more substrates, and wherein at least one substrate is C5a.
[0133] Embodiment I-5. The variant of any one of embodiments I-2 to I-4, wherein an increase in activity comprises an increase in the cleavage of C3a and/or C5a.
[0134] Embodiment I-6. The variant of any one of embodiments I-2 to I-5, wherein the increase in sensitivity comprises an increase in the sensitivity to any one or more of: MASP1, MASP3, Factor D, mast cell degranulation, mCPA3, and neutrophil degranulation cathepsin G.
[0135] Embodiment I-7. The variant of any one of embodiments I-2 to I-6, wherein the increase in activity comprises an increased k_{cat}/K_{M} (M⁻¹ s⁻¹) for cleavage of C3a and/or C5a.
[0136] Embodiment I-8. The variant of embodiment I-7, wherein the increased k_{cat}/K_{M} (M⁻¹ s⁻¹) for cleavage of C3a and/or C5a is about 2-fold, about 3-fold, about 4-fold, about 5-fold, about 6-fold, about 7-fold, about 8-fold, about 9-fold, about 10-fold, about 20-fold, about 30-fold, about 40-fold, about 50-fold, about 60-fold, about 70-fold, about 80-fold, about 90-fold, or about 100-fold greater than that of the wild type CPN.
[0137] Embodiment I-9. The variant of embodiment I-7, wherein the increase in activity comprises an increase in k_{cat} with a decrease in K_{M}.
[0138] Embodiment I-10. The variant of any one of embodiments I-1 to I-9, wherein the increased activity comprises a decreased K_{D} (nM) value for cleavage of C3a and/or C5a.
[0139] Embodiment I-11. The variant of embodiment I-10, wherein the decreased K_{D} (nM) value is about 2-fold, about 3-fold, about 4-fold, about 5-fold, about 6-fold, about 7-fold, about 8-fold, about 9-fold, about 10-fold less than that of the wild type CPN.
[0140] Embodiment I-12. The variant of any one of embodiments I-2 to I-11, wherein the increased activity comprises a decreased EC₅₀ (nM) value for cleavage of C3a and/or C5a, compared to the wild type CPN.
[0141] Embodiment I-13. The variant of embodiment I-12, wherein the decreased EC₅₀ (nM) value for cleavage of C3a and/or C5a is about 10, about 15, about 20, or less than about 20.
[0142] Embodiment I-14. The variant of any one of embodiments I-2 to I-13, wherein the increased half-life is half-life in plasma.
[0143] Embodiment I-15. The variant of embodiment I-14, wherein the increased half-life in plasma is greater than about 24 hours.
[0144] Embodiment I-16. The variant of any one of embodiments I-2 to I-15, wherein the increased half-life in plasma is from about 70 hours to about 150 hours.
[0145] Embodiment I-17. The variant of any one of embodiments I-2 to I-16, wherein the increased sensitivity comprises increased sensitivity for complement activation.
[0146] Embodiment I-18. The variant of any one of embodiments I-1 to I-17, wherein the variant comprises at least one modification corresponding to a wild type non-human CPN.
[0147] Embodiment I-19. The variant of any one of embodiments I-1 to I-17, wherein the variant comprises at least one modification corresponding to a wild type human CPN.
[0148] Embodiment I-20. The variant of embodiment I-19, wherein the CPN variant comprises at least one modification corresponding to a wild type CPN comprising the amino acid sequence as set forth in SEQ ID NO: 1.
[0149] Embodiment I-21. The variant of any one of embodiments I-1 to I-20, comprising one or more of domains of a wild type CPN selected from: a first peptide signal, a catalytic domain (CPN1), a second peptide signal, and a regulatory subunit (CPN2).
[0150] Embodiment I-22. The variant of any one of embodiments I-1 to I-21, wherein the modification with respect to a wild type CPN comprises any one or more of: a deletion of one or more amino acid residues, a deletion of one or more CPN domains, a substitution of one or more amino acid residues, an insertion of one or more amino acid residues, an insertion of one or more CPN domains, a swapping of one or more CPN domains, and an insertion of at least one non-CPN domain or component.
[0151] Embodiment I-23. The variant of embodiment I-22, wherein the at least one non-CPN domain or component comprises at least one domain of any one or more of: carboxypeptidase B2 (CPB2), carboxypeptidase A4 (CPA4), and carboxypeptidase A1 (CPA1).
[0152] Embodiment I-24. The variant of embodiment I-23, wherein the at least one non-CPN domain is at least one domain of CPB2 comprising an activation peptide.
[0153] Embodiment I-25. The variant of embodiment I-23, wherein the at least one non-CPN domain is at least one domain of CPA4 comprising an activation peptide.
[0154] Embodiment I-26. The variant of embodiment I-23, wherein the at least one non-CPN domain is at least one domain of CPA1 comprising an activation peptide.
[0155] Embodiment I-27. The variant of any one of embodiments I-24 to I-26, wherein the activation peptide increases sensitivity of the CPN variant for any one or more of: thrombin-thrombomodulin, MASP1, MASP3, Factor D, mCPA3, cathepsin G.
[0156] Embodiment I-28. The variant of any one of embodiments I-24 to I-27, wherein the activation peptide increases sensitivity of the CPN variant for any one or more of: mast cell degranulation, neutrophil degranulation, and inflammatory cell activation.
[0157] Embodiment I-29. The variant of any one of embodiments I-24 to I-28, wherein the activation peptide increases sensitivity of the CPN variant to complement activation.
[0158] Embodiment I-30. The variant of any one of embodiments I-1 to I-29, wherein the deletion of one or more CPN domains comprises deletion of a CPN2 domain.
[0159] Embodiment I-31. The variant of any one of embodiments I-23 to I-29, wherein the at least one CPB2 domain comprises a CPB2 catalytic domain.
[0160] Embodiment I-32. The variant of any one of embodiments I-23 to I-31, wherein the CPN variant comprises a structural arrangement from N-terminus to C-terminus as (first peptide signal)-(CPB2 activation peptide)-(CPN2).
[0161] Embodiment I-33. The variant of any one of embodiments I-1 to I-32, wherein the CPN variant is further fused to a second component.
[0162] Embodiment I-34. The variant of embodiment I-33, wherein second component comprises a half-life extender.
[0163] Embodiment I-35. The variant of embodiment I-34, wherein the half-life extender is selected from the group consisting of: PEGylation, PASylation, carbohydrates, albumin, and Fc.
[0164] Embodiment I-36. The variant of any one of embodiments I-22 to I-35, wherein the insertion of at least one non-CPN domain or component comprises a first non-CPN domain or component a second non-CPN domain or component.
[0165] Embodiment I-37. The variant of embodiment I-36, wherein the CPN variant comprises a structural arrangement from N-terminus to C-terminus as (first peptide signal)-(first non-CPN domain or component)-(CPN2)-(second non-CPN domain or component).
[0166] Embodiment I-38. The variant of embodiment I-37, wherein the first non-CPN domain or component is an activation peptide or a half-life extender.
[0167] Embodiment I-39. The variant of any one of embodiments I-37 to I-38, wherein the second non-CPN domain or component is a half-life extender or activation peptide.
[0168] Embodiment I-40. The variant of any one of embodiments I-1 to I-39, wherein the variant is a tetramer comprising two heterodimers.
[0169] Embodiment I-41. The variant of any one of embodiments I-1 to I-39, wherein the variant is a single heterodimer.
[0170] Embodiment I-42. The variant of any one of embodiments I-1 to I-41, wherein the variant is non-immunogenic.
[0171] Embodiment I-43. The variant of any one of embodiments I-1 to I-42, wherein the variant is in a zymogen form.
[0172] Embodiment I-44. The variant of any one of embodiments I-1 to I-42, wherein the variant is in an active form.
[0173] Embodiment I-45. A method of treating a disease or condition in a subject in need thereof, comprising administering to the subject any one of the variants of embodiments I-1 to I-44.
[0174] Embodiment I-46. The method of embodiment I-45, wherein the disease or condition is selected from the group consisting of: congenital complement deficiency, control protein deficiency, secondary complement disorder, immunity related disorder, chronic renal disorder, acute inflammatory disorder, antineutrophil cytoplasmic antibody (ANCA)-associated vasculitis (AAV), C3 glomerulopathy (C3G), lupus nephritis, skin disorder, intestinal ischemia and reperfusion (I/R) injury, sepsis, mast cell related disorders, and solid tumors refractory to immunotherapy agents such as pembrolizumab and ipilimumab.
[0175] Embodiment I-47. The method of embodiment I-45, wherein the disease or condition is an acute condition selected from the group consisting of: acute respiratory distress syndrome (ARDS), COVID-19, multisystem organ failure, and sepsis.
[0176] Embodiment I-48. The method of embodiment I-45, wherein the disease or condition is a chronic condition selected from the group consisting of: anti-neutrophil cytoplasmic autoantibody (ANCA) vasculitis, atypical hemolytic uremic syndrome (aHUS), and IgA nephropathy.
[0177] Embodiment I-49. The method of embodiment I-46, wherein the disease or condition is a skin disorder selected from the group consisting of: hidradenitis suppurativa (HS), bullous pemphigoid (BP), and Pyoderma Gangrenosum.
[0178] Embodiment I-50. The method of any one of embodiments I-45 to I-49, wherein the variant is administered in a zymogen form.
[0179] Embodiment I-51. The method of any one of embodiments I-45 to I-49, wherein the variant is administered in an active form.
[0180] Embodiment I-52. The method of any one of embodiments I-45 to I-49, wherein the administration is a subcutaneous administration.
[0181] Embodiment I-53. The method of any one of embodiments I-45 to I-49, wherein the administration is an intravenous administration.
[0182] Embodiment I-54. The method of any one of embodiments I-45 to I-49, wherein the administration comprises administering a vector comprising a nucleic acid encoding any one of the variants of embodiments I-1 to I-44.
[0183] Embodiment I-55. A nucleic acid encoding any one of the variants of embodiments I-1 to I-44.
[0184] Embodiment I-56. A pharmaceutical composition comprising any one of the variants of embodiments I-1 to I-44, and optionally a pharmaceutically acceptable carrier.
[0185] Embodiment I-57. A variant of a carboxypeptidase N1 (CPN1) comprising at least one modification with respect to a wild type CPN1, wherein the variant has at least one improved characteristic as compared to the wild type CPN1.
[0186] Embodiment I-58. A CPN1 variant selected from FIG. 11 of U.S. Ser. No. 63/222,929.
[0187] Embodiment I-59. A CPN1 construct selected from FIG. 12 of U.S. Ser. No. 63/222,929.
[0188] Embodiment I-60. A CPN1 construct comprising a CPN1 variant of FIG. 11 of U.S. Ser. No. 63/222,929.

### Set II

[0189] Embodiment II-1. A variant of a carboxypeptidase N catalytic subunit (CPN1) comprising at least one modification with respect to a wild type CPN1, wherein the variant has at least one improved characteristic as compared to the wild type CPN1.
[0190] Embodiment II-2. The variant of embodiment II-1, wherein the modification with respect to a wild type CPN1 comprises any one or more of: a substitution of one or more amino acid residues, a deletion of one or more amino acid residues, an insertion of one or more amino acid residues, an insertion of one or more CPN domains, and an insertion of one ore more non-CPN domains or components.
[0191] Embodiment II-3. The variant of any one of embodiments II-1 to II-2, wherein the improved characteristic is selected from an increase or a decrease in any one or more of: half-life, activity, potency, substrate affinity, substrate specificity, substrate selectivity, proteolytic sensitivity, cofactor affinity, and catalytic capability.
[0192] Embodiment II-4. The variant of embodiment II-3, wherein the at least one improved characteristic comprises an increase in affinity for one or more substrates, and wherein at least one substrate is C3a.
[0193] Embodiment II-5. The variant of any one of embodiments II-3 to II-4, wherein the at least one improved characteristic comprises an increase in affinity for one or more substrates, and wherein at least one substrate is C5a.
[0194] Embodiment II-6. The variant of any one of embodiments II-3 to II-5, wherein an increase in activity comprises an increase in the cleavage of C3a and/or C5a.
[0195] Embodiment II-7. The variant of any one of embodiments II-3 to II-6, wherein the increase in activity comprises an increased k_{cat}/K_{M} (M⁻¹ s⁻¹) for cleavage of C3a and/or C5a.
[0196] Embodiment II-8. The variant of embodiment II-7, wherein the increased k_{cat}/K_{M} (M⁻¹ s⁻¹) for cleavage of C3a and/or C5a is about 2-fold, about 3-fold, about 4-fold, about 5-fold, about 6-fold, about 7-fold, about 8-fold, about 9-fold, about 10-fold, about 20-fold, about 30-fold, about 40-fold, about 50-fold, about 60-fold, about 70-fold, about 80-fold, about 90-fold, or about 100-fold greater than that of the wild type CPN.
[0197] Embodiment II-9. The variant of embodiment II-7, wherein the increase in activity comprises an increase in k_{cat} with a decrease in K_{M}.
[0198] Embodiment II-10. The variant of any one of embodiments II-1 to II-9, wherein the increased activity comprises a decreased K_{D} (nM) value for cleavage of C3a and/or C5a.
[0199] Embodiment II-11. The variant of embodiment II-10, wherein the decreased K_{D} (nM) value is about 2-fold, about 3-fold, about 4-fold, about 5-fold, about 6-fold, about 7-fold, about 8-fold, about 9-fold, about 10-fold less than that of the wild type CPN.
[0200] Embodiment II-12. The variant of any one of embodiments II-3 to II-11, wherein the increased activity comprises a decreased EC₅₀ (nM) value for cleavage of C3a and/or C5a, compared to the wild type CPN.
[0201] Embodiment II-13. The variant of embodiment II-12, wherein the decreased EC₅₀ (nM) value for cleavage of C3a and/or C5a is about 10, about 15, about 20, or less than about 20.
[0202] Embodiment II-14. The variant of any one of embodiments II-3 to II-13, wherein the increased half-life is observed in plasma.
[0203] Embodiment II-15. The variant of embodiment II-14, wherein the increased half-life in plasma is greater than about 24 hours.
[0204] Embodiment II-16. The variant of any one of embodiments II-3 to II-15, wherein the increased half-life in plasma is from about 70 hours to about 150 hours.
[0205] Embodiment II-17. The variant of any one of embodiments II-1 to II-16, wherein the variant comprises at least one modification corresponding to a wild type non-human CPN1.
[0206] Embodiment II-18. The variant of any one of embodiments II-1 to II-16, wherein the variant comprises at least one modification corresponding to a wild type human CPN1.
[0207] Embodiment II-19. The variant of embodiment II-18, wherein the CPN1 variant comprises at least one modification corresponding to a wild type CPN1 comprising the amino acid sequence as set forth in SEQ ID NO: 6.
[0208] Embodiment II-20. The variant of any one of embodiments II-1 to II-19, wherein the CPN1 variant comprises an amino acid having at least 70%, at least 75%, at least 80%, at least 85%, at least 90%, at least 91%, at least 92%, at least 93%, at least 94%, at least 95%, at least 96%, at least 97%, at least 98%, or even at least 99% sequence identity to SEQ ID NO: 6.
[0209] Embodiment II-21. The variant of any one of embodiments II-1 to II-19, wherein the CPN1 variant comprises the amino acid sequence as set forth in SEQ ID NO: 7, or at least 70%, at least 75%, at least 80%, at least 85%, at least 90%, at least 91%, at least 92%, at least 93%, at least 94%, at least 95%, at least 96%, at least 97%, at least 98%, or even at least 99% sequence identity thereto.
[0210] Embodiment II-22. The variant of any one of embodiments II-1 to II-19, wherein the CPN1 variant comprises the amino acid sequence as set forth in SEQ ID NO: 8, or at least 70%, at least 75%, at least 80%, at least 85%, at least 90%, at least 91%, at least 92%, at least 93%, at least 94%, at least 95%, at least 96%, at least 97%, at least 98%, or even at least 99% sequence identity thereto.
[0211] Embodiment II-23. The variant of any one of embodiments II-1 to II-19, wherein the CPN1 variant comprises the amino acid sequence as set forth in SEQ ID NO: 11, or at least 70%, at least 75%, at least 80%, at least 85%, at least 90%, at least 91%, at least 92%, at least 93%, at least 94%, at least 95%, at least 96%, at least 97%, at least 98%, or even at least 99% sequence identity thereto.
[0212] Embodiment II-24. The variant of any one of embodiments II-1 to II-19, wherein the CPN1 variant comprises the amino acid sequence as set forth in SEQ ID NO: 12, or at least 70%, at least 75%, at least 80%, at least 85%, at least 90%, at least 91%, at least 92%, at least 93%, at least 94%, at least 95%, at least 96%, at least 97%, at least 98%, or even at least 99% sequence identity thereto.
[0213] Embodiment II-25. The variant of any one of embodiments II-1 to II-19, wherein the CPN1 variant comprises SEQ ID NO: 6, SEQ ID NO: 7, SEQ ID NO: 8, SEQ ID NO: 11, or SEQ ID NO:12, comprising one of the modification strings selected from the group consisting of the modification strings provided in Table 4A, Table 4B, and Table 4C.
[0214] Embodiment II-26. The variant of any one of embodiments II-1 to II-19, wherein the CPN1 variant comprises SEQ ID NO: 6, SEQ ID NO: 7, SEQ ID NO: 8, SEQ ID NO: 11, or SEQ ID NO:12, comprising one of the modification strings selected from the group consisting of the modification strings provided in Table 3A, Table 3B, and Table 3C.
[0215] Embodiment II-27. A fusion construct comprising a carboxypeptidase N catalytic subunit (CPN1) or variant thereof.
[0216] Embodiment II-28. The fusion construct of embodiment II-27, selected from the group consisting of SEQ ID NO: 73-SEQ ID NO: 485.
[0217] Embodiment II-29. The fusion construct of embodiment II-27, wherein the construct comprises a CPN1 of SEQ ID NO: 6.
[0218] Embodiment II-30. The fusion construct of embodiment II-27, wherein the CPN1 variant comprises an amino acid having at least 70%, at least 75%, at least 80%, at least 85%, at least 90%, at least 91%, at least 92%, at least 93%, at least 94%, at least 95%, at least 96%, at least 97%, at least 98%, or even at least 99% sequence identity to SEQ ID NO: 6.
[0219] Embodiment II-31. The fusion construct of embodiment II-27, wherein the CPN1 variant is selected from any one of the variants of embodiments II-1 to II-26.
[0220] Embodiment II-32. The fusion construct of embodiment II-27, wherein the CPN1 variant comprises at least one modification corresponding to a wild type CPN1 comprising the amino acid sequence as set forth in SEQ ID NO: 6.
[0221] Embodiment II-33. The fusion construct of embodiment II-27, wherein the CPN1 variant comprises the amino acid sequence as set forth in SEQ ID NO: 7, or at least 70%, at least 75%, at least 80%, at least 85%, at least 90%, at least 91%, at least 92%, at least 93%, at least 94%, at least 95%, at least 96%, at least 97%, at least 98%, or even at least 99% sequence identity thereto.
[0222] Embodiment II-34. The fusion construct of embodiment II-27, wherein the CPN1 variant comprises the amino acid sequence as set forth in SEQ ID NO: 8, or at least 70%, at least 75%, at least 80%, at least 85%, at least 90%, at least 91%, at least 92%, at least 93%, at least 94%, at least 95%, at least 96%, at least 97%, at least 98%, or even at least 99% sequence identity thereto.
[0223] Embodiment II-35. The fusion construct of embodiment II-27, wherein the CPN1 variant comprises the amino acid sequence as set forth in SEQ ID NO: 11, or at least 70%, at least 75%, at least 80%, at least 85%, at least 90%, at least 91%, at least 92%, at least 93%, at least 94%, at least 95%, at least 96%, at least 97%, at least 98%, or even at least 99% sequence identity thereto.
[0224] Embodiment II-36. The fusion construct of embodiment II-27, wherein the CPN1 variant comprises the amino acid sequence as set forth in SEQ ID NO: 12, or at least 70%, at least 75%, at least 80%, at least 85%, at least 90%, at least 91%, at least 92%, at least 93%, at least 94%, at least 95%, at least 96%, at least 97%, at least 98%, or even at least 99% sequence identity thereto.
[0225] Embodiment II-37. The fusion construct of embodiment II-27, wherein the CPN1 variant comprises SEQ ID NO: 6, SEQ ID NO: 7, SEQ ID NO: 8, SEQ ID NO: 11, or SEQ ID NO:12, comprising one or more modifications selected from the group consisting of the modifications provided in Table 4A, Table 4B, and Table 4C.
[0226] Embodiment II-38. The fusion construct of embodiment II-27, wherein the CPN1 variant comprises SEQ ID NO: 6, SEQ ID NO: 7, SEQ ID NO: 8, SEQ ID NO: 11, or SEQ ID NO:12, comprising one of the modification strings selected from the group consisting of the modification strings provided in Table 3A, Table 3B, and Table 3C.
[0227] Embodiment II-39. The fusion construct of any one of embodiments II-27 to II-38, wherein the fusion construct comprises a Glutathione S transferase (GST) amino acid sequence.
[0228] Embodiment II-40. The fusion construct of embodiment II-39, wherein the GST amino acid sequence comprises SEQ ID NO: 31.
[0229] Embodiment II-41. The fusion construct of any one of embodiments II-27 to II-40, wherein the fusion construct comprises a mammalian maltose binding protein (mMBP) amino acid sequence.
[0230] Embodiment II-42. The fusion construct of embodiment II-41, wherein the mMBP amino acid sequence comprises SEQ ID NO: 30.
[0231] Embodiment II-43. The fusion construct of any one of embodiments II-27 to II-42, wherein the fusion construct comprises a small ubiquitin modifying enzyme (SUMO) amino acid sequence.
[0232] Embodiment II-44. The fusion construct of embodiment II-43, wherein the SUMO amino acid sequence comprises SEQ ID NO: 23 or SEQ ID NO: 24.
[0233] Embodiment II-45. The fusion construct of any one of embodiments II-27 to II-44, wherein the fusion construct comprises a Tobacco Etch Virus protease cleavage site (TEV) amino acid sequence.
[0234] Embodiment II-46. The fusion construct of embodiment II-45, wherein the TEV amino acid sequence comprises SEQ ID NO: 25.
[0235] Embodiment II-47. The fusion construct of any one of embodiments II-27 to II-46, wherein the fusion construct comprises an activation peptide of CBP2 (the N-terminal 96aa of a CBP2 protease) amino acid sequence.
[0236] Embodiment II-48. The fusion construct of embodiment II-47, wherein the amino acid sequence of the activation peptide of CBP2 comprises SEQ ID NO: 22.
[0237] Embodiment II-49. The fusion construct of any one of embodiments II-27 to II-48, wherein the fusion construct comprises an Factor Xa protease cleavage site (Xa) amino acid sequence.
[0238] Embodiment II-50. The fusion construct of embodiment II-49, wherein the Factor Xa protease cleavage site (Xa) comprises the amino acid sequence of SEQ ID NO: 29.
[0239] Embodiment II-51. The fusion construct of any one of embodiments II-27 to II-50, wherein the fusion construct comprises a portion of a regulatory CPN2 subunit amino acid sequence.
[0240] Embodiment II-52. The fusion construct of embodiment II-51, wherein the CPN2 amino acid sequence is selected from the group consisting of: CPN2 (1-367), CPN2 (1-370), CPN2 (1-425), CPN2 (1-456), and CPN2 (1-524).
[0241] Embodiment II-53. The fusion construct of any one of embodiments II-27 to II-52, wherein the fusion construct comprises an CD180 amino acid sequence.
[0242] Embodiment II-54. The fusion construct of any one of embodiments II-27 to II-53, wherein the fusion construct comprises an CD180 amino acid sequence.
[0243] Embodiment II-55. The fusion construct of any one of embodiments II-27 to II-54, wherein the fusion construct comprises LR1G1 amino acid sequence.
[0244] Embodiment II-56. The fusion construct of any one of embodiments II-27 to II-38, wherein the fusion construct comprises at least one non-CPN1 or non-CPN2 domain or component.
[0245] Embodiment II-57. The fusion construct of embodiment II-56, wherein the at least one non-CPN1 or non-CPN2 domain or component comprises at least one domain of any one or more of: carboxypeptidase B2 (CPB2), carboxypeptidase A4 (CPA4), and carboxypeptidase A1 (CPA1).
[0246] Embodiment II-58. The fusion construct of any one of embodiments II-27 to II-57, wherein the fusion construct comprises an activation peptide that increases sensitivity of the fusion construct.
[0247] Embodiment II-59. The fusion construct of embodiment II-58, wherein the construct comprises an activation peptide that increases sensitivity of the fusion construct for any one or more of: mast cell degranulation, neutrophil degranulation, and inflammatory cell activation.
[0248] Embodiment II-60. The fusion construct of embodiment II-58, wherein the activation peptide increases sensitivity of the fusion construct for any one or more of: thrombin-thrombomodulin, MASP1, MASP3, Factor D, mCPA3, complement activation, and cathepsin G.
[0249] Embodiment II-61. The fusion construct of any one of embodiments II-27 to II-60, wherein the fusion construct comprises a half-life extender.
[0250] Embodiment II-62. The fusion construct of embodiment II-61, wherein the half-life extender is selected from the group consisting of: PEG, PAS, carbohydrates, albumin, and Fc.
[0251] Embodiment II-63. The fusion construct of embodiment II-62, wherein the albumin comprises human serum albumin.
[0252] Embodiment II-64. The fusion construct of any one of embodiments II-27 to II-63, wherein the fusion construct is non-immunogenic.
[0253] Embodiment II-65. The fusion construct of any one of embodiments II-27 to II-64, wherein the fusion construct is in a zymogen form.
[0254] Embodiment II-66. The fusion construct of any one of embodiments II-27 to II-65, wherein the fusion construct is in an active form.
[0255] Embodiment II-67. A method of treating a disease or condition in a subject in need thereof, comprising administering to the subject any one of the CPN1 variants or fusion constructs of embodiments II-1 to II-66.
[0256] Embodiment II-68. The method of embodiment II-67, wherein the disease or condition is selected from the group consisting of: congenital complement deficiency, control protein deficiency, secondary complement disorder, immunity related disorder, chronic renal disorder, acute inflammatory disorder, antineutrophil cytoplasmic antibody (ANCA)-associated vasculitis (AAV), C3 glomerulopathy (C3G), lupus nephritis, skin disorder, intestinal ischemia and reperfusion (I/R) injury, sepsis, mast cell related disorders, and solid tumors refractory to immunotherapy agents such as pembrolizumab and ipilimumab.
[0257] Embodiment II-69. The method of embodiment II-67, wherein the disease or condition is an acute condition selected from the group consisting of: acute respiratory distress syndrome (ARDS), COVID-19, multisystem organ failure, and sepsis.
[0258] Embodiment II-70. The method of embodiment II-67, wherein the disease or condition is a chronic condition selected from the group consisting of: anti-neutrophil cytoplasmic autoantibody (ANCA) vasculitis, atypical hemolytic uremic syndrome (aHUS), and IgA nephropathy.
[0259] Embodiment II-71. The method of embodiment II-68, wherein the disease or condition is a skin disorder selected from the group consisting of: hidradenitis suppurativa (HS), bullous pemphigoid (BP), and Pyoderma Gangrenosum.
[0260] Embodiment II-72. The method of any one of embodiments II-67 to II-71, wherein the fusion construct as administered is in a zymogen form.
[0261] Embodiment II-73. The method of any one of embodiments II-67 to II-71, wherein the CPN1 variant fusion construct as administered is in an active form.
[0262] Embodiment II-74. The method of any one of embodiments II-67 to II-71, wherein the administration of the CPN1 variant or fusion construct is a subcutaneous administration.
[0263] Embodiment II-75. The method of any one of embodiments II-67 to II-71, wherein the administration of the CPN1 variant or fusion construct is an intravenous administration.
[0264] Embodiment II-76. The method of any one of embodiments II-67 to II-71, wherein the administration comprises administering a vector comprising a nucleic acid encoding any one of the CPN1 variants or fusion constructs of embodiments II-1 to II-66.
[0265] Embodiment II-77. A nucleic acid encoding any one of the CPN1 variants or fusion constructs of embodiments II-1 to II-66.
[0266] Embodiment II-78. A pharmaceutical composition comprising any one of the CPN1 variants or fusion constructs of embodiments II-1 to II-66, and optionally a pharmaceutically acceptable carrier.

### EXAMPLES

### Example 1: Activation Peptide Screening for Fusion With CPN

[0267] A peptide library can be used for the selection of effective activation peptide sequences, which can be expressed as an 8-mer, 10-mer, or a 12-mer, and so on. Purified MASP1, MASP3, Factor D, mCPA3, and cathepsin G can be used to screen for the activation peptide sequences. A mass spectrometry-based method can be used for each protease to evaluate the effectiveness of each activation peptide sequence tested.

[0268] In order to identify sequences efficiently cleaved by a selected enzyme, the positional scanning approach is used. The linear 8-mer (i.e., 8-amino acid long) peptide libraries covering the P4 to P4′ positions are generated for each enzyme based on the sequence of the specific substrates described in the literature. For example, the library for MASP-1 will be based on the cleavage sequence of protease-activated receptor 4 (YPGK↓F, SEQ ID NO: 67)⁵, for MASP-3 on sequence derived of the combinatorial peptide library (GGK↓IFGG, SEQ ID NO: 68)⁶, for Factor D on the cleavage sequence of Factor B (QQKR↓KIVL, SEQ ID NO: 69)⁷, and for cathepsin G on the cleavage sequence of interleukin-33 (VECF↓AFGI, SEQ ID NO: 70)⁸. The selected sequence will be incorporated into the thrombin cleavage site from CPB2 activation peptide (i.e., VSPR↓ASAS, SEQ ID NO: 71). For each library, the screening for the best substitutions (residues with the highest affinity towards the selected enzyme and selectivity over others) will be performed as follows: each of the selected position (with the exception of the positions indicated in red which are necessary for enzyme recognition) will be replaced, one by one, with natural amino acid residues (except for Cys) to generate 18 individual peptides per one position screened. For instance, the library for MASP-3 will consist of 7 sub-libraries for the following positions: P4, P3, P2, P1, P1′, P2′, P3′, P4′, wherein the positions P are counted from the point of cleavage, which is between P1 and P′, each containing 18 individual peptides (total of 126 peptides). Subsequently, the cleavage studies are performed by incubating the obtained analogs with the selected enzymes at different time points (at least 6 time points). FIG. 5 depicts a general schematic diagram of the screening process, and examples of libraries for the activation peptide screening.

### Methodology

[0269] Peptides are prepared by manual and automated solid-phase peptide synthesis based on standard Fmoc strategy protocols using 2-chlorotrityl chloride resin. After completion of the synthesis, peptides are cleaved using trifluoroacetic acid (TFA) and required scavengers (selected based on the peptide sequence). The obtained crudes are purified using high performance liquid chromatography (HPLC) and their purity (>95%) will be characterized by HPLC. Enzymes will be purchased from commercial suppliers (i.e., R&D Systems, Enzo Life Science). The conditions (e.g., enzyme and peptide concentrations, pH) for the cleavage studies will be optimized for each enzyme using commercially available fluorogenic substrates. The cleavage experiments will be performed by incubating each peptide with the selected enzyme at different time points (0, 5, 15, 30, 60, 120 and 240 min). The reactions will be quenched with formic acid. The samples will be centrifuged, supernatant will be collected recovered, and stored in −80° C. Cleavage analysis will be done by HPLC and mass spectrometry analysis.

### Example 2: Screening for Activated CPN Variants

[0270] Assays are performed to evaluate the activation of a CPN zymogen, followed by C3a and/or C5a digestion, for selection of effective CPN variants. The assays are used to determine the k_{cat}/K_{M} of the activated CPN. A first assay is used to screen the CPN variants' k_{cat}/K_{M} of towards C3a versus C5a, and a second assay is used to screen the zymogen forms of CPN chimeras for their activation by complement enzymes.

[0271] Briefly, CPB2, CPN wild type and CPN chimeras are incubated with their respective complement activation enzyme and the negative control T-TM complex for a period of time before the reaction is terminated by the addition of PPACK. Kinetic analysis of hydrolysis of 8-10-mer C3a and C5a peptides by CPB2 and CPN is performed, and Michaelis-Menten kinetics is used to determine the k_{cat}/K_{M} for the hydrolysis by CPB2 or CPN of the 10-mer peptide. The portion of the C3a and C5a peptides used for the assay are indicated in bold in Table 2 below.

TABLE 2.1
C3a and C5a Peptide Substrate Sequences

| | |
|---|---|
| C3a | SVQLTEKRMDKVGKYPKELRKCCEDGMRENPMRFSCQ |
| | RRTRFISLGEACKKVELDCCNYITELRRQHARASHLG |
| | LAR |
| | (SEQ ID NO: 4) |
| C5a | TLQKKIEEIAAKYKHSVVKKCCYDGACVNNDETCEQR |
| | AARISLGPRCIKAFTECCVVASQLRANISHKDMQLGR |
| | (SEQ ID NO: 5) |

[0272] The cleaved peptide is resolved by HPLC, and the nmol of the peptide generated is determined from the peak area of cleaved peptide. The values for K_{M} and k_{cat} are then determined by plotting the initial velocities of cleavage against the different substrate concentrations tested, and fitting to the Michaelis-Menten equation by non-linear regression, as is known in the art.

### Example: 3: Receptor Activation Assay

[0273] A beta-arrestin GPCR assay can be used to measure the activity of the CPN variants for their substrates, which can be C3a and/or C5a. C3a and/or C5a receptor activation upon binding of C3a and/or C5a is measured by the amount of luminescence generated, indicative of recruitment of beta-arrestin, which is directly related to receptor activation, thus providing a determination of the activity level of the C3a and/or C5a. Briefly, CPN variants are incubated with C3a and/or C5a and the digestion is stopped with a CPN inhibitor. Digests are then incubated with cells and detecting reagents are added. Luminescence is read to measure the amount of residual C3a or C5a resulting from the CPN variant digestion.

### Example 4: Functional Assay—Calcium Signaling

[0274] A functional assay measuring calcium signaling can be performed to assess the level of C3a or C5a inhibition by CPN variants. Imaging can be done to show the calcium signaling taking place. Briefly, cells transfected with C3aR or C5aR are incubated with the CPN variants to be tested, to determine whether the CPN variants are capable of directly activating C3aR or C5aR, and whether the CPN variants are capable of interfering with C3a or C5a to thus avoid C3aR or C5aR activation. The main readout for cell line activation will be the monitoring of intracellular calcium levels (increased after C3aR or C5aR activation) by real-time fluorescence microscopy in a temperature-controlled atmosphere. Following treatments, intracellular calcium will be visualized with a time-lapse fluorescent microscope. Levels of calcium signaling shown through fluorescent imaging will determine whether the CPN variants are effectively interfering with C3a or C5a to thus prevent or reduce C3aR or C5aR activation. HEK cells expressing or not expressing the receptors C3a and C5a are loaded with Fluo-4, a calcium sensitive probe, then imaged under an Apotome microscope wide field, 20× objective with a temperature-controlled atmosphere. Quantification of fluorescent signals are performed using the software ImageJ, and global increase in mean fluorescence intensity (MFI) is evaluated.

### Example 5: In Vivo Models of Disease

[0275] Animal models can be used for further study of diseases related to dysregulation of complement. Chronic models include: lupus nephritis using MRL/lpr and NZB/W F1 mice, C3G using rats, ANCA AAV using mice, bullous pemphigoid using mice. Acute models include: cecal ligation and puncture using rats, peritonitis using mice, LPS lung injury using mice, and kidney transplant I/R injury using mice.

### Example 6: Expression of CPN1 Variants

[0276] In general, the Expi293™ Expression System Kit (A14635 From Thermo Fisher Scientific) was used to transfect and transiently express CPN1 and its variants. Briefly, cells were diluted in pre-warmed media to indicated desired starting density in an appropriate vessel size based on volume. Optionally, cells were pre-diluted to desired transfection density for multiple transfections and desired total mL column used. DNA/optimem and Expifectamine/optimem were prepared as two separate mixtures, inverted, and incubated for 5 mins at RT. Optionally, expifectamine/optimem master mix with ˜3% extra volume for multiple transfections can be made. Expifectamine mix was added to DNA mix, mixed by inversion, and allowed to complex for 10 mins. Complexes were added dropwise to cells while swirling. Cells were placed in an incubator at an appropriate shake speed for vessel size.

[0277] FIGS. 6A-6C depict Coomassie staining from SDS-PAGE analysis showing various CPN chimeras expressed in Expi293 cells. Generally, the expression of CPN1-HSA and CPN1-CPB2-HSA were shown to have better expression in Expi293 cells than the other tested constructs.

[0278] Thirteen CPN1 constructs were transiently transfected in Expi293 cells. After 2 or 3 days of transient expression, cell supernatants were collected for SDS PAGE gel analysis. Cell supernatants were mixed with NuPage loading dye containing reducing agent and samples heated 95° C. for 5 minutes. Samples were loaded in Tris-Bis gel 4-12% and run at 150V for 1 hour. Gels were incubated with SimplyBlue Safe stain to detect proteins. Among the 13 constructs tested CPN1-SP-Ig-HSA tag and CPN1-CPB2-SP-Ig-HSA tag expressed best.

[0279] FIG. 6D shows a Coomassie staining from SDS-PAGE analysis of CPN1 construct expression, using a similar process as depicted in FIGS. 6A-6C, with five CPN1 constructs. These five CPN1 constructs were also transiently transfected in Expi293 cells. After 3 days of transient expression, cell supernatants were collected for SDS-PAGE gel analysis. Cell supernatants were mixed with NuPage loading dye with (R) or without (NR) reducing agent and samples heated 95° C. for 5 minutes. Samples were loaded in Tris-Bis gel 4-12% and run at 150V for 1 hour. Gels were incubated with SimplyBlue Safe stain to detect proteins. Overall, among these five constructs, CPN1-SP-Ig-HSA tag expressed best.

[0280] FIGS. 6E-6F show eight exemplary CPN1 constructs and their corresponding SDS-PAGE analysis of cell culture supernatants after 4 days of transient expression in Expi293 cells. Generally, the constructs with HSA fusion showed the best expression. Similarly, FIG. 6G-6H shows the construct His-SUMO-CPN1-HSA and its SDS-PAGE analysis. The results show that His-SUMO-CPN1-HSA can be expressed and purified by His-Trap and SUMO cleavage.

[0281] FIGS. 61-6J shows exemplary CPN1 constructs with a TEV protease cleavage site (CPN1-TEV-HSA and CPN1-TEV-LL-HSA) and without a TEV protease cleavage site (CPN1-HSA). High expression of all three constructs was seen in SDS-PAGE analysis of cell culture supernatants after 4 days of transient expression in Expi293 (FIG. 6K). Further, FIG. 6L shows SDS-PAGE analysis of purified CPN1-TEV-HSA and CPN1-TEV-LL-HSA proteins treated with or without TEV protease. The cleavage of the constructs into CPN1 and TEV-HSA components in samples exposed to TEV protease is clearly seen. Further, to test the CPN1 catalytic activity of CPN1-TEV-HSA and CPN1-TEV-LL-HSA after HSA cleavage by TEV protease, a peptide based TAFI activity assay (Pefakit®) TAFI, Catalogue Number: 800186) was carried out. CPN1-HSA, which has no TEV cleavage site, served as control. Results of the TAFI activity assay are shown in FIG. 6M, which show that CPN1 preserves its catalytic activity after HSA cleavage in both CPN1-TEV-HSA and CPN1-TEV-LL-HSA constructs. Further, FIGS. 6N-60 show additional five exemplary CPN1 constructs and their corresponding SDS-PAGE expression analysis.

[0282] FIGS. 6P-6W show the SDS-PAGE expression analysis of further exemplary CPN1 constructs. Samples for the gels were generally prepared with 10 μL 4×LDS/DTT and 30 μL sample. The samples were heated to 90° C. for 5 minutes. 8 μL ladder loaded and 15 μL sample were loaded in relevant lanes. 4-12% Bis-Tris Gels were used and run at 150 V for 50 min. SimplyBlue Safe Stain was used to detect proteins.

### Example 7A: Purification of CPN1 Variants by a 2-Step Purification Process

[0283] FIGS. 7A-7C depict various chromatography and SDS-PGE results from purification of CPN variants. The CPN variants provided herein can be purified by a generic 2-step purification process negating the need for an affinity purification step with expensive resins. Briefly, clarified culture supernatant (with or without flocculant pretreatment) is diluted 1/10 in Buffer A (50 mM Tris-HCl, 500 mM NaCl pH 7.5) and applied to a Benzamidine-Sepharose column. The column is washed with 4CV of Buffer A to baseline and then eluted with a 20 CV linear gradient from Buffer A to 100% Buffer B (50 mM Tris-HCl, 500 mM NaCl, 1 M Arginine pH 7.5). Peak fractions were pooled corresponding to relative purity on a SDS-PAGE gel (FIG. 7A). Purity was assessed by absolute size exclusion chromatography (aSEC) with major peak purity of 82%, HMWS 5% and LMWS 13%. Pooled fractions were desalted to AEX Buffer A (25 mM Tris-HCl pH 7.5 and loaded onto a AEX column. The column was washed with 4CV of AEX Buffer A to baseline and then eluted with a 30 CV linear gradient. From AEX Buffer A to 100% AEX Buffer B (25 mM Tris-HCl, 1 M NaCl, pH 7.5). Fractions were pooled based o relative purity from a SDS-PAGE gel (FIG. 7B). An increase in purity was increased to 94% main peak fraction and 6% HMWS (FIG. 7C).

### Example 7B: Purification of CPN1 Variants by Affinity Purification

[0284] CPN1 constructs may also be purified using affinity purification-based methods. For example, CPN1-HSA (SEQ ID NO: 9) purification and high molecular weight removal was carried out as described below. CPN1-HSA was expressed using the Expi293 expression system, according to manufacturer's recommendations. After expression, cell culture supernatant was harvested and clarified by centrifugation at 3000×g for 30 min followed by vacuum filtration through a 0.22 μm filter.

[0285] CaptureSelect human albumin affinity matrix resin (ThermoFisher Scientific, Catalog No 191297050) was equilibrated by incubating the resin slurry with 20 mM Tris, pH 7.4 in a conical bottom centrifuge tube. The mixture was centrifuged at 3000×g for 25 min at room temperature and the supernatant was decanted. This process was repeated 3 times. After equilibration, the resin was loaded with cell culture supernatant, incubated for 30 mins, and centrifuged at 3000×g for 30 mins at room temperature. The supernatant flow-thru was decanted. The resin was then washed 3 times by incubating with 20 mM Tris, pH 7.4, centrifuging at 3000×g for 25 mins and pouring off the supernatant. Finally, the target protein was eluted by incubating the resin with 20 mM Tris, 1 M NaCl, 0.5 M Arg HCl, pH 7.4, spinning down at 3000×g for 10 min at room temperature, and collecting the supernatant. An exemplary SDS-PAGE gel stained with Coomassie showing load, flow-through, and 3 elutions from this procedure using a 500 mL cell culture supernatant load with 25 mL resin slurry is shown in FIG. 7D.

[0286] Elution fractions were pooled and dialyzed in 1×PBS and subsequently concentrated to >5 mg/mL using Amicon 10 K 15 mL filters (Millipore Sigma, Catalog No 901024). After concentration, preparative SEC was performed to remove high molecular weight (HMW) species. To perform the preparative SEC, A HiPrep 26/60 Sepharcyl S-200 High Resolution column (Cytiva, Catalog No 17119501) was first equilibrated with 4 column volumes (CV) of 1×PBS. Then, 3 mL concentrated protein sample was loaded via a sample loop onto the column. Separation was performed by running 4 CV 1×PBS over the loaded column. An exemplary chromatogram in FIG. 7E shows a clear separation between HMW (rt˜97 min) and main peak (rt˜118 min). The main peak fractions (rt 113 min-149 min) were pooled and concentrated for endotoxin removal and finishing.

[0287] CPN1-TEV-HSA was similarly purified using the CaptureSelect spin column method though at a smaller scale. FIG. 7F shows SDS-PAGE gels stained with Coomassie showing load, flow-through, and 3 elutions at different load and resin volumes.

### Example 8A: C3a and C5a Activity Assay

[0288] FIGS. 8A-8B depict the results of an activity assay measuring the activation of C3aR and C5aR, respectively. The activity assay is used to examine the activation of C3aR and C5aR by C3a and C5a, and can also be used to screen for CPN activity on C3a and C5a. Briefly, target cells are infected with Retroparticles containing β-Arrestin Enzyme Acceptor (“EA”). Next, the PathHunter β-Arrestin parental cell line is transfected with the GPCR-PK plasmid (containing the GPCR of interest and the β-gal ProLink peptide tag). Next, the ligand to be tested, C3a or C5a, is added. Then, the substrate for active b-Arrestin EA is added. Luminescence is read to measure the amount of residual C3a or C5a and EC₅₀ calculated.

### Example 8B: Activity Characterization Assay

[0289] Cell culture supernatants (CPN1-HSA and TAFI activation peptide-CPN1-HSA) or purified protein (CPN1-HSA) were evaluated for carboxypeptidase activity against anaphylatoxin substrates C3a or C5a. CPN1-HSA and TAFI activation peptide-CPN1-HSA amino acid sequences are shown in Table 1.

[0290] Carboxypeptidase enzymatic cleavage of terminal arginine from specific substrates (C3a or C5a, Complement Technology, Texas, USA) was assessed by mass spectrometric detection of released arginine. Following in vitro cleavage at 37° C., reactions were stopped via addition of acid (0.4 M perchloric acid, Sigma, Missouri, USA) or specific inhibitors (250 nM 1,10-phenanthroline or EDTA, Sigma, Missouri, USA). Reactions were derivatized (SymDAQ, Charles Rivers Laboratories, California, USA), internal standard (13C6-Arginine, Sigma, Missouri, USA) spiked into reactions and products separated via liquid chromatography-mass spectrometry (LC-MS/MS). Released arginine and spiked calibrator were then measured by mass transition. Released arginine was quantified by linear regression against the spiked in calibrator. Reactant and buffer alone controls were included for background correction.

[0291] To further characterize the activity of purified carboxypeptidases cleavage of C3a or C5a anaphylatoxin substrate was assessed using the PathHunter® β-Arrestin assay (Eurofins DiscoveRx, California, USA) for GPCR C3aR1 or C5aR1 cell lines. To provide an approximation for percent cleavage, the cleavage reaction mixtures were run with a full titration curve and compared to native ligand (C3a or C5a) and fully cleaved native ligand (C3a-desArg and C5a-desArg) on their respective receptors. Substrate concentration was varied to generate response curves used to calculate EC50 by nonlinear regression (Prism 9, log (agonist) vs. response-4 parameter variable slope model). Using the calculated EC50's, percent cleavage was estimated by the equation 100%−(native substrate EC50/test article EC50×100). Percent cleavage reported was normalized by subtracting C3a-desArg or C5a-desArg alone background signaling. Native anaphylatoxins and their native-desArg versions, buffer and vehicle alone controls were included for background evaluation.

TABLE 8.1
In vitro carboxypeptidase activity of CPN1-HSA
variants for the anaphyltoxin substrate C3a.

| Variant | Enzyme | Assay | Metric | Measurement |
|---|---|---|---|---|
| CPN1-HSA | Purified | Arg LC-MS/MS | K_{cat}/K_{M} | 8 × 10⁵ M⁻¹ s⁻¹ |
| CPN1-HSA | Purified | Arg LC-MS/MS | EC₅₀ | 4.42 × 10⁻⁹ M |
| CPN1-HSA | Supernatant | Arg LC-MS/MS | % Arg released | 100% |
| TAFI activation | Supernatant | Arg LC-MS/MS | % Arg released | 72% |
| peptide-CPN1-HSA | | | | |
| CPN1-HSA | Purified | GPCR | % Cleavage | 100% |
| Variant | Enzyme | Assay | Metric | Measurement |
| CPN1-HSA | Supernatant | GPCR | % Cleavage | 100% |

TABLE 4
In vitro carboxypeptidase activity of CPN1-HSA
variants for the anaphylotoxin substrate C5a

| Variant | Enzyme | Assay | Metric | Measurement |
|---|---|---|---|---|
| CPN1-HSA | Purified | Arg LC-MS/MS | K_{cat}/K_{M} | ND |
| CPN1-HSA | Purified | Arg LC-MS/MS | EC₅₀ | 3.53 × 10⁻⁸ M |
| CPN1-HSA | Supernatant | Arg LC-MS/MS | % Arg released | 20% |
| TAFI activation | Supernatant | Arg LC-MS/MS | % Arg released | 14% |
| peptide-CPN1-HSA | | | | |
| CPN1-HSA | Purified | GPCR | % Cleavage | 82% |
| CPN1-HSA | Supernatant | GPCR | % Cleavage | 97% |

ND = not determined

### Example 8C: Dansyl-Ala-Arg Activity Assay

[0292] Assay principle: CPN1 cleaves C-terminal arginine from dansyl-ala-arg (CAS #: 87687-46-5) substrate. Activity was measured in an end-point assay format. The product dansyl-ala-OH was separated from dansyl-ala-arg after acidification and extraction with chloroform. The dansyl-ala-OH product (CAS #: 53332-27-7) was measured via absorbance at λ=340 nm. Fluorescence of the chloroform-extracted dansyl-ala-OH product can also be measured at λex/λem 340/495 nm.

[0293] Stock materials included 10 mM dansyl-ala-arg dissolved in DMSO, 10 mM dansyl-ala-OH dissolved in DMSO for calibration curve, Activity assay buffer: 100 mM Tris, pH 7.4, 50 mM NaCl, 0.01% Tween 80 Quartz cuvette (10 cm path length).

[0294] Each reaction mixture (200 μL) was prepared in 1.5 mL Eppendorf tubes and included 400 uM dansyl-ala-arg, activity assay buffer, and 0.35 uM of relevant CPN1 enzyme. The reaction was allowed to proceed at 37° C. for 2 h. To terminate and acidify the reaction, 20 uL of 1 M HCl was added to the reaction tubes. 1 mL of chloroform was then added to each reaction mixture and vortexed for 15 s to extract the product (dansyl-ala-OH) into the chloroform layer. 0.8 mL of chloroform (the bottom phase) was pipetted into the quartz cuvette and absorbance at 340 nm was measured (or scanned for better visualization). The cuvette was rinsed twice with 0.8 mL chloroform between sample measurements. A calibration curve with danysl-ala-OH absorbance at 340 nm was used to quantify amount of product. The substrate dansyl-ala-arg did not extract into chloroform, even at high (2.5 mM) concentrations; in contrast, dansyl-ala-OH provided large signal (λₘₐₓ=340 nm) after extraction. The calibration curve of dansyl-ala-OH was observed to be linear (˜100 μM-1.5 mM).

[0295] CPB1 (positive control) and CPN1-HSA were tested using the above protocol. Both CPB1 and CPN1-HSA showed activity as seen in FIG. 8C and FIG. 8D respectively. The corresponding tables in FIG. 8C (for CPB1 positive control) and FIG. 8D (for CPN1-HSA) depict the signal levels and concentrations for CPB1 and CPN1-HSA, respectively.

### Example 8D: Hippuryl-Arg Activity Assay

[0296] Assay principle: CPN1 cleaves CPN1 cleaves C-terminal arginine. Both hippuryl-arg (CAS: 744-46-7) and hippuric acid (CAS: 495-69-2) absorb at 254 nm, but hippuric acid has a slightly higher ε. The amount of product produced is quantified by ΔOD254 between sample and [S]₀.

[0297] Stocks/Materials included 10 mM hippuryl-arg dissolved in water, 10 mM hippuric acid dissolved in water for calibration curve, activity assay buffer: 100 mM Tris, pH 7.4, 50 mM NaCl, 0.01% Tween 80, and UV-detectable 96-well plates.

[0298] 2× enzyme solution in a non-binding plate (i.e. 0.7 uM [E]) was prepared. Serial dilutions in this plate were performed when multiple [E] were tested. 50 μL of buffer (for substrate and product standards) or 2× enzyme solution to a UV-detectable plate were added. 2× solutions of substrate and product (i.e. 2 mM hippuryl-arg and 2 mM hippuric acid, respectively) were prepared. 50 μL of substrate and product standard wells were added, followed by 50 μL of substrate to wells with enzyme to start the reaction. The plates were loaded in the plate reader as soon as possible, typically within 20 s of starting the reactions. Absorbance at 254 nm was read in 20 s intervals for 1 h. For analysis the extent of reaction and amount of product produced at each time point was quantified. Mixing effects were seen up to 5 min, so productivity curves (integrated rate equations) were used to fit kinetic parameters. CPB1 was found to generate signal from hippuryl-arg substrate in a dose-dependent manner in above assay protocol.

[0299] Activities of CPN1-HSA and TAFI activation peptide-CPN1-HSA were tested using the above assay protocol at various concentrations ranging from 0.044 uM to 0.35 uM, as shown in FIGS. 8E-8F, respectively. In FIG. 8E each concentration of CPN1-HSA was tested in duplicate. Similarly, in FIG. 8F, each concentration of TAFI activation peptide-CPN1-HSA was tested in duplicate.

### Example 9: CPN1-HSA Efficacy after Intravenous Administration in a Rodent Model of Complement Activation

[0300] Examination of in vivo activity of CPN1-HSA in Acute Respiratory Distress Syndrome and evaluation of the therapeutic effects of CPN1-HSA and anti-C5 in an LPS-induced acute respiratory distress syndrome (ARDS) mouse model was carried out. The purpose of this study was to assess the efficacy of CPN1-HSA and anti-murine C5 antibody to limit complement mediated acute pulmonary inflammation in a mouse model of ARDS induced by a single administration of lipopolysaccharide (LPS).

[0301] Method description: A mouse model of aseptic ARDS was used to study complement involvement following an intratracheal instillation (IT) of LPS. Male C57BL/6 mice (Charles River Laboratories) weighing 20 to 25 g at enrolment were anesthetized under isoflurane and intratracheally instilled with 50 μg LPS (1 mg/mL LPS isolated from E. coli 0111: B4 in 0.9% saline solution, Sigma).

[0302] Immediately prior to IT LPS administration, animals received an IV injection of 5 mg/kg CPN1-HSA (as shown in FIG. 12, SEQ ID NO: 9, n=8) or control article (PBST with 0.01% P80; n=8) at a dosing volume of 5 mL/kg. Positive control animals received 1 mg/animal anti-mouse C5 recombinant antibody (Clone BB5.1, Creative Biolabs, n=8) intraperitoneally at a dose volume of 1 mL. This antibody is highly specific for mouse C5 and, like the FDA-approved anti-human C5 monoclonal antibody, eculizumab, BB5.1 binding to C5 efficiently inhibits cleavage of C5 to C5a and C5b. All animals were sacrificed 24 hours post-LPS IT.

[0303] Whole body plethysmography was performed prior to LPS instillation, as well as 6- and 24-hours post-instillation. Bronchoalveolar lavage fluid (BALF) was harvested in three 300 μL perfusions of the right lung with cold PBS 1× containing Protease Inhibitor 1× (SigmaFAST®). Evaluation of complement component fragments by mass spectrometry (MS) was performed on K₂-EDTA plasma samples collected at baseline (>5 days prior to study start) and sacrifice as well as lung tissue and BALF samples collected at sacrifice. Cytokine and chemokine levels (Mouse 31 plex Multiplex Immunoassay analyzed with a BioPlex 200 Cytokine Array, Assay Kit Millipore MILLIPLEX, performed by Eve Technologies, Calgary, Canada) were assessed in K₂-EDTA plasma, BALF, and lung tissue (homogenized in PBS 1×+0.1% Triton X-100 with protease cocktail inhibitors) collected at sacrifice and baseline (plasma only). A cell count differential was performed on BALF samples to assess leukocyte recruitment to the lung. Myeloperoxidase (MPO) and histamine levels were assessed in BALF samples by commercially available ELISA kits (Abcam ab155458 and Abcam ab213975).

[0304] Conclusions: CPN1-HSA administered prophylactically at the time of LPS intratracheal instillation significantly protected against the development of ARDS-like phenotype in mice. PenH, or enhanced respiratory pause, an index of pulmonary congestion associated with ARDS disease severity, increased on average 726% from healthy baseline levels in untreated animals (FIG. 9A). In animals receiving CPN1-HSA this was significantly reduced to an average of 337% greater than baseline (FIG. 9A). A similar but non-significant trend was observed in anti-C5 antibody treated animals. Both treatments demonstrated trends toward protection at 6 hours. The less prominent protection of anti-C5 antibody after 24 hours compared to CPN1-HSA suggests the protease had a longer pharmacodynamic window, possibly due to a longer circulating half-life or increased substrate processing.

[0305] Consistent with the physiologically protective role of CPN1-HSA, administration was associated with significant reductions in pro-inflammatory chemokines in key body compartments at 24 hours (FIGS. 10A-F). Specifically, circulating macrophage inflammatory protein-1 alpha (MIP-1α) was significantly reduced in CPN1-HSA treated animal plasma with slight reductions also observed in the lung but not BALF (FIG. 10A-C). Levels of RANTES (Regulated upon Activation, Normal T Cell Expressed and Presumably Secreted), a proinflammatory multi-functional chemokine secreted by lung epithelial cells, were significantly lower in the lung tissue in CPN1-HSA treated animals compared to untreated controls with a similar non-significant trend observed in anti-C5 antibody treated animals (FIG. 10F). These effects were not observed in plasma levels, consistent with the epithelial surface role of this chemokine in lung injury (FIG. 10D). Mice engineered to constitutively overexpress RANTES demonstrate increased neutrophil migration to the airways. In mice, deletion of CCR1, a receptor that detects MIP-la and RANTES, is associated with protection from inflammatory lung injury secondary to pancreatitis. The ability to modulate this signaling pathway speaks to the potential role of CPN1-HSA to similarly regulate other inflammatory pathologies due to complement dysregulation.

[0306] The findings demonstrated in this model confirm that CPN1-HSA administration is as efficacious, if not more, than anti-C5 antibody treatment to protect against LPS-induced development of ARDS in mice. The number of molecules of CPN1-HSA administered required to produce a comparable or superior effect was over 7-fold less compared to anti-C5 antibody dosing (Table 5, columns C and D). The assumptions for this calculation are described in Table 5 columns A and B below.

TABLE 9.1
In vivo study parameters

| | | | | D |
|---|---|---|---|---|
| | A | | | Dose Level Fold- |
| | Molecular | B | C | Difference |
| | Weight | Dose | Dose | (Anti-C5 |
| Treatment | (g/mol) | (mg/kg) | μmol/kg | Ab:CPN1-HSA) |
| CPN1-HSA | 112,700 | 5.0 | 0.04 | 7.25 |
| Anti-C5 Antibody | 150,000^{A} | 44.05^{B} | 0.29 | |

^{A}Molecular weight estimated based on standard murine IgG;
^{B}Dose level calculated using the mean body weight of anti-C5 treated animals at time of dosing (22.7 g)

### Example 10: In Vivo Pharmacokinetics Assays in Rat Model

[0307] Examination of in vivo pharmacokinetics of CPN1-HSA was carried out in rats. The pharmacokinetics profile of pooled CPN1-HSA construct numbers 351 and 6 (the only difference being the presence of an 8 or 12 linker-length, respectively) was assessed following a single intravenous injection (IV) in adult male and female Sprague Dawley rats, four each for a total of eight animals. Animals were dosed at 2 mg/kg intravenously via tail vein injection. Blood samples were collected into EDTA pre-dose and at 0.5 h, 1 h, 3 h, 6 h, 12 h, 24 h, 48 h, 72 h, 120 h, 168 h, 240 h, and 336 h followed by plasma separation for PK bioassay analysis.

[0308] CPN1-HSA concentration in plasma was assessed via a quantitative sandwich enzyme electrochemiluminescence (ECL) antigen assay for detection of construct numbers 351 and 6 in rat EDTA plasma. For quantification, Meso Scale Discovery (MSD, Rockville, MA) assay plates were prepared by coating with 1 μg/ml of immunogen purified rabbit polyclonal capture antibody specific to the antigen (MyBioSource, San Diego, CA). Standards, QCs, and plasma samples were added to the plate wells and incubated to facilitate capture. Plates were washed followed by addition of 1 μg/ml of a biotinylated human HSA monoclonal antibody (Invitrogen, Waltham, MA) and 0.3 μg/ml SULFO-TAG Streptavidin (MSD, Rockville, MD) for detection. The plates were once again washed and MSD Read Buffer T (2×) added. Plates were read using a MSD Sector S 600 reporting ECL relative light units (RLU).

[0309] CPN1-HSA plasma concentrations were interpolated via standard curve and pharmacokinetic (PK) parameters derived from a noncompartmental analysis performed in Excel based on the determined concentrations. Area Under the Curve (AUC) was calculated using the linear trapezoidal method, AUC 0-inf was calculated from the AUC 0-t (determined up to the last measurable concentration) and then extrapolated to infinity using the estimated half-life. Mean Residence Time (MRT) was calculated using the moment theory method (Area Under the Moment Curve [AUMC 0-inf] divided by AUC 0-inf). Sufficient sampling was determined by confirming that the extrapolated AUC did not exceed 20% of total measurable AUC.

[0310] For PK parameter estimates, three subjects were included in the analysis. Of the eight total animals, one was excluded due to inconsistently high baseline detection compared to the other animals and four animals did not meet model criteria due to too few datapoints above assay Lower Limit Of Quantitation (LLOQ). Of note, a sample collected immediately post-dose was not obtained. Given the immediate and complete absorption of an IV dose into circulation, the Cₘₐₓ is likely under-estimated and the Tₘₐₓ over-estimated for this report. PK parameter estimates from the three animals assessed are summarized in FIG. 11A. The PK profiles of the 3 animals analyzed are depicted in FIG. 11B, and the representative PK profile is depicted in FIG. 11C.

[0311] The pharmacokinetic profile of CPN1-HSA is determined following a single subcutaneous injection in Sprague Dawley rats. Adult male and female rats weighing between 200 g and 250 g at the time are used and pair-housed during the acclimation period and experimental phase of the study. Prior to the study, a blood sample is taken for pre-dose measurement a minimum of one day prior to dosing.

[0312] Animals are injected subcutaneously with test compounds. Experimental groups are dosed at 6 mg/kg of CPN1-HSA subcutaneously. Subcutaneous doses are administered via bolus injection between the skin and underlying layers of tissue in the scapular region on the back of each animal.

### Example 11: In Vivo Pharmacokinetics Assays in Primate Model

[0313] The pharmacokinetics profile of CPN1-HSA are determined following a single intravenous injection or single subcutaneous injection in cynomolgus macaques. Adult male and female macaques age 2-4 years at study start and weighing between 2-4 kg at study start are used.

[0314] On study day 0, the test article is delivered by a single intravenous bolus or a single subcutaneous injection to alert, chair-restrained adult male and female macaques. Experimental groups are dosed at either 2 mg/kg of CPN1-HSA intravenously or 6 mg/kg of CPN1-HSA subcutaneously. FIG. 12, Table 1 summarizes the dose levels and regimen of the test articles and vehicles.

[0315] Test articles and vehicles are administered by single intravenous or subcutaneous injection. For intravenous doses, 2 mg/kg of CPN1-HSA are administered as a bolus via catheter followed by approximately 5 mL sterile saline flush. The dose time is recorded at the time the saline flush is completed. For subcutaneous doses, 6 mg/kg of CPN1-HSA are administered to alert, chair-restrained animals by injection between shoulder blades.

[0316] For both intravenous and subcutaneous administration, baseline blood is collected immediately prior to dosing. Blood collections are performed in alert, chair-restrained animals. For animals dosed intravenously, blood is collected from the leg opposite the intravenous dosing site. FIG. 12, Table 2 summarizes the blood collection schedule.

[0317] Samples for plasma isolation are collected into tubes containing K₂-EDTA until processing. Samples are centrifuged at 2000×g for 10 minutes at 4° C. within 1 hour of collection. The presence of hemolysis is documented following centrifugation, and the maximum amount of plasma is recovered and frozen prior to analysis.

[0318] Samples for serum isolation are collected into serum separator tubes, stored at ambient temperature for at least 15 minutes or until blood is clotted, and then processed. Samples are centrifuged at 2000×g for 10 minutes at 4° C. within 1 hour of collection. The presence of hemolysis is documented following centrifugation, and the maximum amount of serum is recovered and frozen prior to analysis.

### Example 12: Serum Stability Assays

[0319] Serum stability was measured for CPN1-HSA constructs at 37° C. for extended times. To quantify protein levels, semi-quantitative Western blots were performed with CPN1 primary antibodies. Constructs were dosed into serum and diluted 1:50, diluted in LDS, reduced with a reducing agent, and boiled for 5 minutes.

[0320] For the Western blot, 15 μL of samples were loaded into each well, and the gel run at 100V for 10 minutes, then 150V for 90 minutes. Afterwards, the gel was transferred to a nitrocellulose membrane and blocked for 1 hour in 5% nfd milk at room temperature. Then, the blot was incubated with CPN1 primary antibodies at 1:1000 dilution in 5% nfd milk overnight at 4° C. The following day, the blot was subjected to three 10-minute TBST washes, then incubated with secondary antibody at 1:20000 dilution in 5% nfd milk for 1 hour at room temperature. Afterwards, the blot was again washed three times for 10 minutes with TBST. Lastly, the blot was developed and imaged with SuperSignal™ West Pico PLUS Chemiluminescent Substrate. FIGS. 13A and 13B depict Western blots for two exemplary CPN1-HSA constructs.

[0321] Using the semi-quantitative Western blot, a half-life curve was generated for CPN1-HSA constructs. FIGS. 13C and 13D depict half-life curves for exemplary CPN1-HSA constructs in serum.

[0322] Western blot analysis was also performed on plasma isolated from rats following intravenous or subcutaneous injection of CPN1-HSA constructs. FIGS. 14A and 14B depict two different rats' plasma samples and the presence of two exemplary CPN1-HSA constructs. Western blot analysis was then performed on plasma isolated from rats following subcutaneous injection of CPN1-HSA constructs, and is depicted in FIG. 14C. Lastly, Western blot analysis was performed on plasma derived from rats subjected to intravenous injection of human plasma purified CPN1, and is depicted in FIG. 14D.

### Example 13: Protease Activity Assay

[0323] The relative activity of CPN constructs was measured via modified use of the Pefakit TAFI (thrombin activatable fibrinolysis inhibitor) assay, which determines the activity of CPN proteins on a synthetic substrate relative to a TAFI-containing plasma calibration curve. The assay provides no information on activity or enzyme kinetics of CPN proteins on native substrates, but serves as a high-throughput method for determining relative activities o CPN proteins.

[0324] Enzymatic hydrolysis of the synthetic substrate CPN protein generates colorimetric 5-mercapto-2-nitro-benzoic acid product. The rate of increase in absorbance is interpolated against a plasma calibration curve to yield the % TAFIa (thrombin activatable fibrinolysis inhibitor activated form) activity.

[0325] The activity was calculated in two ways. First, the product generation rate was interpolated from the plasma calibration curve and dilution corrected to yield a volumetric activity in units of % TAFIa activity. The volumetric % TAFIa activity indicates the amount of calibrated TAFI-containing plasma required to achieve activity equal to the sample. This is useful for comparing samples with equal concentrations. The second activity was calculated by dividing the % TAFIa activity of the samples by the sample enzyme concentration to yield a specific activity in units of % TAFIa activity per μM enzyme (/μM). The specific % TAFIa activity indicates the intrinsic activity of the CP protein in the sample regardless of the concentration. For example, if multiple samples have equally active CP protein at different concentrations, the volumetric activities will differ while the specific activities would not.

[0326] The specific activity of CPN constructs was measured and compiled into a graph depicted in FIG. 15. The bars marked with asterisks indicate improved performance over Const. No. 6.

### Example 14: In Silico Design of CPN Constructs

[0327] CPN1 was reengineered based on structural understanding of the enzyme from crystallographic data of human CPN1 (PDB ID: 2 nsm) and homologous carboxypeptidases. A number of computational tools were used in the development of designs aimed at improving and modulating a number of CPN1 properties including stability, solubility, activity, and substrate selectivity. The primary tool used in these designs was the Rosetta suite of programs in addition to the docking program PIPER and molecular dynamics simulations via OpenMM.

[0328] A computational site-saturation mutagenesis experiment was run to identify positions in the native CPN1 structure that could be modified in order to improve stability. Clusters of amino acids around the identified hot spots were mutated for improved stability using the FastDesign algorithm of Rosetta. Molecular dynamics simulations of select mutations revealed further sites of instability which were rectified via the introduction of strategic disulfide bonds. Additionally, a workflow involving docking, molecular dynamics simulations, and homology modeling was used to determine the binding interaction between CPN1 and the complements C3a and C5a. These complexes served as the basis for CPN1 mutations that aimed at improving selectivity for either C3a or C5a. Further docking experiments with endogenous CPN1 substrates was used to identify potential prodomains that could be fused to the N-terminus of CPN1 with a cleavable linker to create a zymogen out of the enzyme, using the same cleavage site (SRVR|AT, SEQ ID NO: 72) found in thrombin activatable fibrinolysis inhibitor (TAFI).

The application's sequence listing, which the Patent Office published only in electronic form, follows.

SEQUENCE LISTING (490 sequences)

SEQ ID NO: 1 - protein, 458 aa, Homo sapiens
MSDLLSVFLHLLLLFKLVAPVTFRHHRYDDLVRTLYKVQNECPGITRVYSIGRSVEGRHLYVLEFSDHPGIHEPLEPEVKYVGNMHGNEALGRELMLQLSEFLCEEFRNRNQRIVQLIQDTRIHILPSMNPDGYEVAAAQGPNKPGYLVGRNNANGVDLNRNFPDLNTYIYYNEKYGGPNHHLPLPDNWKSQVEPETRAVIRWMHSFNFVLSANLHGGAVVANYPYDKSFEHRVRGVRRTASTPTPDDKLFQKLAKVYSYAHGWMFQGWNCGDYFPDGITNGASWYSLSKGMQDFNYLHTNCFEITLELSCDKFPPEEELQREWLGNREALIQFLEQVHQGIKGMVLDENYNNLANAVISVSGINHDVTSGDHGDYFRLLLPGIYTVSATAPGYDPETVTVTVGPAEPTLVNFHLKRSIPQVSPVRRAPSRRHGVRAKVQPQARKKEMEMRQLQRGPA

SEQ ID NO: 2 - protein, 423 aa, Homo sapiens
MKLCSLAVLVPIVLFCEQHVFAFQSGQVLAALPRTSRQVQVLQNLTTTYEIVLWQPVTADLIVKKKQVHFFVNASDVDNVKAHLNVSGIPCSVLLADVEDLIQQQISNDTVSPRASASYYEQYHSLNEIYSWIEFITERHPDMLTKIHIGSSFEKYPLYVLKVSGKEQAAKNAIWIDCGIHAREWISPAFCLWFIGHITQFYGIIGQYTNLLRLVDFYVMPVVNVDGYDYSWKKNRMWRKNRSFYANNHCIGTDLNRNFASKHWCEEGASSSSCSETYCGLYPESEPEVKAVASFLRRNINQIKAYISMHSYSQHIVFPYSYTRSKSKDHEELSLVASEAVRAIEKISKNTRYTHGHGSETLYLAPGGGDDWIYDLGIKYSFTIELRDTGTYGFLLPERYIKPTCREAFAAVSKIAWHVIRNV

SEQ ID NO: 3 - protein, 460 aa, Artificial Sequence
  synthetic construct
MKLCSLAVLVPIVLFCEQHVFAFQSGQVLAALPRTSRQVQVLQNLTTTYEIVLWQPVTADLIVKKKQVHFFVNASDVDNVKAHLNVSGIPCSVLLADVEDLIQQQISNDTVSPRASASYYVTFRHHRYDDLVRTLYKVQNECPGITRVYSIGRSVEGRHLYVLEFSDHPGIHEPLEPEVKYVGNMHGNEALGRELMLQLSEFLCEEFRNRNQRIVQLIQDTRIHILPSMNPDGYEVAAAQGPNKPGYLVGRNNANGVDLNRNFPDLNTYIYYNEKYGGPNHHLPLPDNWKSQVEPETRAVIRWMHSFNFVLSANLHGGAVVANYPYDKSFEHRVRGVRRTASTPTPDDKLFQKLAKVYSYAHGWMFQGWNCGDYFPDGITNGASWYSLSKGMQDFNYLHTNCFEITLELSCDKFPPEEELQREWLGNREALIQFLEQVHQGIKGMVLDENYNNLANAVIS

SEQ ID NO: 4 - protein, 77 aa, Unknown
  C3a peptide substrate
SVQLTEKRMDKVGKYPKELRKCCEDGMRENPMRFSCQRRTRFISLGEACKKVFLDCCNYITELRRQHARASHLGLAR

SEQ ID NO: 5 - protein, 74 aa, Unknown
  C5a peptide substrate
TLQKKIEEIAAKYKHSVVKKCCYDGACVNNDETCEQRAARISLGPRCIKAFTECCVVASQLRANISHKDMQLGR

SEQ ID NO: 6 - protein, 438 aa, Homo sapiens
VTFRHHRYDDLVRTLYKVQNECPGITRVYSIGRSVEGRHLYVLEFSDHPGIHEPLEPEVKYVGNMHGNEALGRELMLQLSEFLCEEFRNRNQRIVQLIQDTRIHILPSMNPDGYEVAAAQGPNKPGYLVGRNNANGVDLNRNFPDLNTYIYYNEKYGGPNHHLPLPDNWKSQVEPETRAVIRWMHSFNFVLSANLHGGAVVANYPYDKSFEHRVRGVRRTASTPTPDDKLFQKLAKVYSYAHGWMFQGWNCGDYFPDGITNGASWYSLSKGMQDFNYLHTNCFEITLELSCDKFPPEEELQREWLGNREALIQFLEQVHQGIKGMVLDENYNNLANAVISVSGINHDVTSGDHGDYFRLLLPGIYTVSATAPGYDPETVTVTVGPAEPTLVNFHLKRSIPQVSPVRRAPSRRHGVRAKVQPQARKKEMEMRQLQRGPA

SEQ ID NO: 7 - protein, 398 aa, Homo sapiens
VTFRHHRYDDLVRTLYKVQNECPGITRVYSIGRSVEGRHLYVLEFSDHPGIHEPLEPEVKYVGNMHGNEALGRELMLQLSEFLCEEFRNRNQRIVQLIQDTRIHILPSMNPDGYEVAAAQGPNKPGYLVGRNNANGVDLNRNFPDLNTYIYYNEKYGGPNHHLPLPDNWKSQVEPETRAVIRWMHSFNFVLSANLHGGAVVANYPYDKSFEHRVRGVRRTASTPTPDDKLFQKLAKVYSYAHGWMFQGWNCGDYFPDGITNGASWYSLSKGMQDFNYLHTNCFEITLELSCDKFPPEEELQREWLGNREALIQFLEQVHQGIKGMVLDENYNNLANAVISVSGINHDVTSGDHGDYFRLLLPGIYTVSATAPGYDPETVTVTVGPAEPTLVNFHLKRS

SEQ ID NO: 8 - protein, 320 aa, Homo sapiens
VTFRHHRYDDLVRTLYKVQNECPGITRVYSIGRSVEGRHLYVLEFSDHPGIHEPLEPEVKYVGNMHGNEALGRELMLQLSEFLCEEFRNRNQRIVQLIQDTRIHILPSMNPDGYEVAAAQGPNKPGYLVGRNNANGVDLNRNFPDLNTYIYYNEKYGGPNHHLPLPDNWKSQVEPETRAVIRWMHSFNFVLSANLHGGAVVANYPYDKSFEHRVRGVRRTASTPTPDDKLFQKLAKVYSYAHGWMFQGWNCGDYFPDGITNGASWYSLSKGMQDFNYLHTNCFEITLELSCDKFPPEEELQREWLGNREALIQFLEQVHQ

SEQ ID NO: 9 - protein, 995 aa, Artificial Sequence
  CPN1-HSA
VTFRHHRYDDLVRTLYKVQNECPGITRVYSIGRSVEGRHLYVLEFSDHPGIHEPLEPEVKYVGNMHGNEALGRELMLQLSEFLCEEFRNRNQRIVQLIQDTRIHILPSMNPDGYEVAAAQGPNKPGYLVGRNNANGVDLNRNFPDLNTYIYYNEKYGGPNHHLPLPDNWKSQVEPETRAVIRWMHSFNFVLSANLHGGAVVANYPYDKSFEHRVRGVRRTASTPTPDDKLFQKLAKVYSYAHGWMFQGWNCGDYFPDGITNGASWYSLSKGMQDFNYLHTNCFEITLELSCDKFPPEEELQREWLGNREALIQFLEQVHQGIKGMVLDENYNNLANAVISVSGINHDVTSGDHGDYFRLLLPGIYTVSATAPGYDPETVTVTVGPAEPTLVNFHLKRSGSSGGSSGGSSGDAHKSEVAHRFKDLGEENFKALVLIAFAQYLQQCPFEDHVKLVNEVTEFAKTCVADESAENCDKSLHTLFGDKLCTVATLRETYGEMADCCAKQEPERNECFLQHKDDNPNLPRLVRPEVDVMCTAFHDNEETFLKKYLYEIARRHPYFYAPELLFFAKRYKAAFTECCQAADKAACLLPKLDELRDEGKASSAKQRLKCASLQKFGERAFKAWAVARLSQRFPKAEFAEVSKLVTDLTKVHTECCHGDLLECADDRADLAKYICENQDSISSKLKECCEKPLLEKSHCIAEVENDEMPADLPSLAADFVESKDVCKNYAEAKDVFLGMFLYEYARRHPDYSVVLLLRLAKTYETTLEKCCAAADPHECYAKVFDEFKPLVEEPQNLIKQNCELFEQLGEYKFQNALLVRYTKKVPQVSTPTLVEVSRNLGKVGSKCCKHPEAKRMPCAEDYLSVVLNQLCVLHEKTPVSDRVTKCCTESLVNRRPCFSALEVDETYVPKEFNAETFTFHADICTLSEKERQIKKQTALVELVKHKPKATKEQLKAVMDDFAAFVEKCCKADDKETCFAEEGKKLVAASQAALGL

SEQ ID NO: 10 - protein, 475 aa, Homo sapiens
MGWSLILLFLVAVATRVHSCPMGCDCFVQEVFCSDEELATVPLDIPPYTKNIIFVETSFTTLETRAFGSNPNLTKVVFLNTQLCQFRPDAFGGLPRLEDLEVTGSSFLNLSTNIFSNLTSLGKLTLNFNMLEALPEGLFQHLAALESLHLQGNQLQALPRRLFQPLTHLKTLNLAQNLLAQLPEELFHPLTSLQTLKLSNNALSGLPQGVFGKLGSLQELFLDSNNISELPPQVFSQLFCLERLWLQRNAITHLPLSIFASLGNLTFLSLQWNMLRVLPAGLFAHTPCLVGLSLTHNQLETVAEGTFAHLSNLRSLMLSYNAITHLPAGIFRDLEELVKLYLGSNNLTALHPALFQNLSKLELLSLSKNQLTTLPEGIFDTNYNLFNLALHGNPWQCDCHLAYLFNWLQQYTDRLLNIQTYCAGPAYLKGQVVPALNEKQLVCPVTRDHLGFQVTWPDESKAGGSWDLAVQERAA

SEQ ID NO: 11 - protein, 397 aa, Homo sapiens
VTFRHHRYDDLVRTLYKVQNECPGITRVYSIGRSVEGRHLYVLEFSDHPGIHEPLEPEVKYVGNMHGNEALGRELMLQLSEFLCEEFRNRNQRIVQLIQDTRIHILPSMNPDGYEVAAAQGPNKPGYLVGRNNANGVDLNRNFPDLNTYIYYNEKYGGPNHHLPLPDNWKSQVEPETRAVIRWMHSFNFVLSANLHGGAVVANYPYDKSFEHRVRGVRRTASTPTPDDKLFQKLAKVYSYAHGWMFQGWNCGDYFPDGITNGASWYSLSKGMQDFNYLHTNCFEITLELSCDKFPPEEELQREWLGNREALIQFLEQVHQGIKGMVLDENYNNLANAVISVSGINHDVTSGDHGDYFRLLLPGIYTVSATAPGYDPETVTVTVGPAEPTLVNFHLKR

SEQ ID NO: 12 - protein, 396 aa, Homo sapiens
VTFRHHRYDDLVRTLYKVQNECPGITRVYSIGRSVEGRHLYVLEFSDHPGIHEPLEPEVKYVGNMHGNEALGRELMLQLSEFLCEEFRNRNQRIVQLIQDTRIHILPSMNPDGYEVAAAQGPNKPGYLVGRNNANGVDLNRNFPDLNTYIYYNEKYGGPNHHLPLPDNWKSQVEPETRAVIRWMHSFNFVLSANLHGGAVVANYPYDKSFEHRVRGVRRTASTPTPDDKLFQKLAKVYSYAHGWMFQGWNCGDYFPDGITNGASWYSLSKGMQDFNYLHTNCFEITLELSCDKFPPEEELQREWLGNREALIQFLEQVHQGIKGMVLDENYNNLANAVISVSGINHDVTSGDHGDYFRLLLPGIYTVSATAPGYDPETVTVTVGPAEPTLVNFHLK

SEQ ID NO: 13 - protein, 524 aa, Homo sapiens
CPMGCDCFVQEVFCSDEELATVPLDIPPYTKNIIFVETSFTTLETRAFGSNPNLTKVVFLNTQLCQFRPDAFGGLPRLEDLEVTGSSFLNLSTNIFSNLTSLGKLTLNFNMLEALPEGLFQHLAALESLHLQGNQLQALPRRLFQPLTHLKTLNLAQNLLAQLPEELFHPLTSLQTLKLSNNALSGLPQGVFGKLGSLQELFLDSNNISELPPQVFSQLFCLERLWLQRNAITHLPLSIFASLGNLTFLSLQWNMLRVLPAGLFAHTPCLVGLSLTHNQLETVAEGTFAHLSNLRSLMLSYNAITHLPAGIFRDLEELVKLYLGSNNLTALHPALFQNLSKLELLSLSKNQLTTLPEGIFDTNYNLFNLALHGNPWQCDCHLAYLFNWLQQYTDRLLNIQTYCAGPAYLKGQVVPALNEKQLVCPVTRDHLGFQVTWPDESKAGGSWDLAVQERAARSQCTYSNPEGTVVLACDQAQCRWLNVQLSPQQGSLGLQYNASQEWDLRSSCGSLRLTVSIEARAAGP

SEQ ID NO: 14 - protein, 456 aa, Homo sapiens
CPMGCDCFVQEVFCSDEELATVPLDIPPYTKNIIFVETSFTTLETRAFGSNPNLTKVVFLNTQLCQFRPDAFGGLPRLEDLEVTGSSFLNLSTNIFSNLTSLGKLTLNFNMLEALPEGLFQHLAALESLHLQGNQLQALPRRLFQPLTHLKTLNLAQNLLAQLPEELFHPLTSLQTLKLSNNALSGLPQGVFGKLGSLQELFLDSNNISELPPQVFSQLFCLERLWLQRNAITHLPLSIFASLGNLTFLSLQWNMLRVLPAGLFAHTPCLVGLSLTHNQLETVAEGTFAHLSNLRSLMLSYNAITHLPAGIFRDLEELVKLYLGSNNLTALHPALFQNLSKLELLSLSKNQLTTLPEGIFDTNYNLFNLALHGNPWQCDCHLAYLFNWLQQYTDRLLNIQTYCAGPAYLKGQVVPALNEKQLVCPVTRDHLGFQVTWPDESKAGGSWDLAVQERAA

SEQ ID NO: 15 - protein, 543 aa, Homo sapiens
MGWSLILLFLVAVATRVHSCPMGCDCFVQEVFCSDEELATVPLDIPPYTKNIIFVETSFTTLETRAFGSNPNLTKVVFLNTQLCQFRPDAFGGLPRLEDLEVTGSSFLNLSTNIFSNLTSLGKLTLNFNMLEALPEGLFQHLAALESLHLQGNQLQALPRRLFQPLTHLKTLNLAQNLLAQLPEELFHPLTSLQTLKLSNNALSGLPQGVFGKLGSLQELFLDSNNISELPPQVFSQLFCLERLWLQRNAITHLPLSIFASLGNLTFLSLQWNMLRVLPAGLFAHTPCLVGLSLTHNQLETVAEGTFAHLSNLRSLMLSYNAITHLPAGIFRDLEELVKLYLGSNNLTALHPALFQNLSKLELLSLSKNQLTTLPEGIFDTNYNLFNLALHGNPWQCDCHLAYLFNWLQQYTDRLLNIQTYCAGPAYLKGQVVPALNEKQLVCPVTRDHLGFQVTWPDESKAGGSWDLAVQERAARSQCTYSNPEGTVVLACDQAQCRWLNVQLSPQQGSLGLQYNASQEWDLRSSCGSLRLTVSIEARAAGP

SEQ ID NO: 16 - protein, 78 aa, Unknown
  transthyretin domain
GIKGMVLDENYNNLANAVISVSGINHDVTSGDHGDYFRLLLPGIYTVSATAPGYDPETVTVTVGPAEPTLVNFHLKRS

SEQ ID NO: 17 - protein, 585 aa, Homo sapiens [sequence omitted]

SEQ ID NO: 18 - protein, 18 aa, Homo sapiens
MKWVTFISLLFLFSSAYS

SEQ ID NO: 19 - protein, 19 aa, Unknown
  signal sequence of Azurocidin
MTRLTVLALLAGLLASSRA

SEQ ID NO: 20 - protein, 20 aa, Unknown
  signal sequence of interleukin 2
MYRMQLLSCIALSLALVTNS

SEQ ID NO: 21 - protein, 19 aa, Unknown
  signal sequence of immunoglobin G
MGWSLILLFLVAVATRVHS

SEQ ID NO: 22 - protein, 96 aa, Homo sapiens
FQSGQVLAALPRTSRQVQVLQNLTTTYEIVLWQPVTADLIVKKKQVHFFVNASDVDNVKAHLNVSGIPCSVLLADVEDLIQQQISNDTVSPRASAS

SEQ ID NO: 23 - protein, 110 aa, Artificial Sequence
  10 Histidine residues followed by SUMO
GHHHHHHHHHHSLQDSEVNQEAKPEVKPEVKPETHINLKVSDGSSEIFFKIKKTTPLRRLMEAFAKRQGKEMDSLTFLYDGIEIQADQTPEDLDMEDNDIIEAHREQIGG

SEQ ID NO: 24 - protein, 99 aa, Unknown
  Small Ubiquitin Modifying enzyme
SLQDSEVNQEAKPEVKPEVKPETHINLKVSDGSSEIFFKIKKTTPLRRLMEAFAKRQGKEMDSLTFLYDGIEIQADQTPEDLDMEDNDIIEAHREQIGG

SEQ ID NO: 25 - protein, 7 aa, Unknown
  Tobacco Etch Virus protease cleavage site
ENLYFQG

SEQ ID NO: 26 - protein, 20 aa, Artificial Sequence
  Long Linker
GSSGGSSGGSSGGSSGGSSG

SEQ ID NO: 27 - protein, 225 aa, Unknown
  fragment crystallizable region
THTCPPCPAPEAAGGPSVFLFPPKPKDTLMISRTPEVTCVVVDVSHEDPEVKFNWYVDGVEVHNAKTKPREEQYNSTYRVVSVLTVLHQDWLNGKEYKCKVSNKALGAPIEKTISKAKGQPREPQVYTLPPSRDELTKNQVSLTCLVKGFYPSDIAVEWESNGQPENNYKTTPPVLDSDGSFFLYSKLTVDKSRWQQGNVFSCSVMHEALHNHYTQKSLSLSPGK

SEQ ID NO: 28 - protein, 225 aa, Unknown; identical to SEQ ID NO: 27
  no 1st DK LALA-PG

SEQ ID NO: 29 - protein, 4 aa, Unknown
  Factor Xa protease cleavage site
AEGR

SEQ ID NO: 30 - protein, 361 aa, Unknown
  mammalian maltose binding protein
KTEEGKLVIWINGDKGYNGLAEVGKKFEKDTGIKVTVEHPDKLEEKFPQVAATGDGPDIIFWAHDRFGGYAQSGLLAEITPAAAFQDKLYPFTWDAVRYNGKLIAYPIAVEALSLIYNKDLLPNPPKTWEEIPALDKELKAKGKSALMFNLQEPYFTWPLIAADGGYAFKYAAGKYDIKDVGVDNAGAKAGLTFLVDLIKNKHMNADTDYSIAEHAFNHGETAMTINGPWAWSNIDTSAVNYGVTVLPTFKGQPSKPFVGVLSAGINAASPNKELAKEFLENYLLTDEGLEAVNKDKPLGAVALKSYEEELVKDPRVAATMENAQKGEIMPNIPQMSAFWYAVRTAVINAASGRQTVDAAL

SEQ ID NO: 31 - protein, 218 aa, Unknown
  Glutathione S transferase
MSPILGYWKIKGLVQPTRLLLEYLEEKYEEHLYERDEGDKWRNKKFELGLEFPNLPYYIDGDVKLTQSMAIIRYIADKHNMLGGCPKERAEISMLEGAVLDIRYGVSRIAYSKDFETLKVDFLSKLPEMLKMFEDRLCHKTYLNGDHVTHPDFMLYDALDVVLYMDPMCLDAFPKLVCFKKRIEAIPQIDKYLKSSKYIAWPLQGWQATFGGGDHPPK

SEQ ID NO: 32 - protein, 6 aa, Artificial Sequence
  His-Tag
HHHHHH

SEQ ID NO: 33 - protein, 12 aa, Artificial Sequence
  Linker
GSSGGSSGGSSG

SEQ ID NO: 34 - protein, 11 aa, Artificial Sequence
  Variant N2Term
GHHHHHHHHHH

SEQ ID NO: 35 - protein, 16 aa, Artificial Sequence
  Linker
AAAQTNAAAASSASLE

SEQ ID NO: 36 - protein, 31 aa, Artificial Sequence
  Linker
GGSSGGSSGGSSGGSSGGSSGGSSGGSSGGS

SEQ ID NO: 37 - protein, 26 aa, Artificial Sequence
  Linker
GGSSGGSSGGSSGGSSGGSSGGSSGG

SEQ ID NO: 38 - protein, 40 aa, Artificial Sequence
  Linker
GGSSGGSSGGSSGGSSGGSSGGSSGGSSGGSSGGSSSSGG

SEQ ID NO: 39 - protein, 4 aa, Artificial Sequence
  Linker
GGGG

SEQ ID NO: 40 - protein, 10 aa, Artificial Sequence
  Variant C2Term
HHHHHHHHHH

SEQ ID NO: 41 - protein, 4 aa, Artificial Sequence
  Linker
GSSG

SEQ ID NO: 42 - protein, 8 aa, Artificial Sequence
  Linker
GSSGGSSG

SEQ ID NO: 43 - protein, 16 aa, Artificial Sequence
  Linker
GSSGGSSGGSSGGSSG

SEQ ID NO: 44 - protein, 5 aa, Artificial Sequence
  hCPN1 modification
DDDDK

SEQ ID NO: 45 - protein, 8 aa, Artificial Sequence
  activation peptide
VGGKIFGG

SEQ ID NO: 46 - protein, 8 aa, Artificial Sequence
  activation peptide
VGAKIFGG

SEQ ID NO: 47 - protein, 8 aa, Artificial Sequence
  activation peptide
VGDKIFGG

SEQ ID NO: 48 - protein, 8 aa, Artificial Sequence
  activation peptide
VGEKIFGG

SEQ ID NO: 49 - protein, 8 aa, Artificial Sequence
  activation peptide
VGFKIFGG

SEQ ID NO: 50 - protein, 8 aa, Artificial Sequence
  activation peptide
VGHKIFGG

SEQ ID NO: 51 - protein, 8 aa, Artificial Sequence
  activation peptide
VGIKIFGG

SEQ ID NO: 52 - protein, 8 aa, Artificial Sequence
  activation peptide
VGKKIFGG

SEQ ID NO: 53 - protein, 8 aa, Artificial Sequence
  activation peptide
VGLKIFGG

SEQ ID NO: 54 - protein, 8 aa, Artificial Sequence
  activation peptide
VGMKIFGG

SEQ ID NO: 55 - protein, 8 aa, Artificial Sequence
  activation peptide
VGNKIFGG

SEQ ID NO: 56 - protein, 8 aa, Artificial Sequence
  activation peptide
VGPKIFGG

SEQ ID NO: 57 - protein, 8 aa, Artificial Sequence
  activation peptide
VGQKIFGG

SEQ ID NO: 58 - protein, 8 aa, Artificial Sequence
  activation peptide
VGRKIFGG

SEQ ID NO: 59 - protein, 8 aa, Artificial Sequence
  activation peptide
VGSKIFGG

SEQ ID NO: 60 - protein, 8 aa, Artificial Sequence
  activation peptide
VGTKIFGG

SEQ ID NO: 61 - protein, 8 aa, Artificial Sequence
  activation peptide
VGVKIFGG

SEQ ID NO: 62 - protein, 8 aa, Artificial Sequence
  activation peptide
VGWKIFGG

SEQ ID NO: 63 - protein, 8 aa, Artificial Sequence
  activation peptide
VGYKIFGG

SEQ ID NO: 64 - protein, 55 aa, Artificial Sequence
  CPN1-HSA
VTVGPAEPTLVNFHLKRSGSSGGSSGGSSGDAHKSEVAHRFKDLGEENFKALVLI

SEQ ID NO: 65 - protein, 58 aa, Artificial Sequence
  CPN1-TEV-HSA
VTVGPAEPTLVNFHLKRSENLYFQGGSSGGSSGGSSGDAHKSEVAHRFKDLGEENFKA

SEQ ID NO: 66 - protein, 67 aa, Artificial Sequence
  CPN1-TEV-LL-HSA
VTVGPAEPTLVNFHLKRSENLYFQGGSSGGSSGGSSGGSSGGSSGDAHKSEVAHRFKDLGEENFKAL

SEQ ID NO: 67 - protein, 5 aa, Unknown
  cleavage site
YPGKF

SEQ ID NO: 68 - protein, 7 aa, Unknown
  cleavage site
GGKIFGG

SEQ ID NO: 69 - protein, 8 aa, Unknown
  cleavage site
QQKRKIVL

SEQ ID NO: 70 - protein, 8 aa, Unknown
  cleavage site
VECFAFGI

SEQ ID NO: 71 - protein, 8 aa, Unknown
  cleavage site
VSPRASAS

SEQ ID NO: 72 - protein, 6 aa, Unknown
  cleavage site
SRVRAT

SEQ ID NO: 73 - protein, 398 aa, Artificial Sequence; identical to SEQ ID NO: 7
  hCPN1 variant

SEQ ID NO: 74 - protein, 398 aa, Artificial Sequence; identical to SEQ ID NO: 7
  hCPN1 variant

SEQ ID NO: 75 - protein, 398 aa, Artificial Sequence; identical to SEQ ID NO: 7
  hCPN1 variant

SEQ ID NO: 76 - protein, 398 aa, Artificial Sequence; identical to SEQ ID NO: 7
  hCPN1 variant

SEQ ID NO: 77 - protein, 404 aa, Artificial Sequence
  hCPN1 variant
VTFRHHRYDDLVRTLYKVQNECPGITRVYSIGRSVEGRHLYVLEFSDHPGIHEPLEPEVKYVGNMHGNEALGRELMLQLSEFLCEEFRNRNQRIVQLIQDTRIHILPSMNPDGYEVAAAQGPNKPGYLVGRNNANGVDLNRNFPDLNTYIYYNEKYGGPNHHLPLPDNWKSQVEPETRAVIRWMHSFNFVLSANLHGGAVVANYPYDKSFEHRVRGVRRTASTPTPDDKLFQKLAKVYSYAHGWMFQGWNCGDYFPDGITNGASWYSLSKGMQDFNYLHTNCFEITLELSCDKFPPEEELQREWLGNREALIQFLEQVHQGIKGMVLDENYNNLANAVISVSGINHDVTSGDHGDYFRLLLPGIYTVSATAPGYDPETVTVTVGPAEPTLVNFHLKRSHHHHHH

SEQ ID NO: 78 - protein, 995 aa, Artificial Sequence; identical to SEQ ID NO: 9
  hCPN1 variant

SEQ ID NO: 79 - protein, 749 aa, Artificial Sequence
  hCPN1 variant
VTFRHHRYDDLVRTLYKVQNECPGITRVYSIGRSVEGRHLYVLEFSDHPGIHEPLEPEVKYVGNMHGNEALGRELMLQLSEFLCEEFRNRNQRIVQLIQDTRIHILPSMNPDGYEVAAAQGPNKPGYLVGRNNANGVDLNRNFPDLNTYIYYNEKYGGPNHHLPLPDNWKSQVEPETRAVIRWMHSFNFVLSANLHGGAVVANYPYDKSFEHRVRGVRRTASTPTPDDKLFQKLAKVYSYAHGWMFQGWNCGDYFPDGITNGASWYSLSKGMQDFNYLHTNCFEITLELSCDKFPPEEELQREWLGNREALIQFLEQVHQGIKGMVLDENYNNLANAVISVSGINHDVTSGDHGDYFRLLLPGIYTVSATAPGYDPETVTVTVGPAEPTLVNFHLKRSGSSGGSSGGSSGCPMGCDCFVQEVFCSDEELATVPLDIPPYTKNIIFVETSFTTLETRAFGSNPNLTKVVFLNTQLCQFRPDAFGGLPRLEDLEVTGSSFLNLSTNIFSNLTSLGKLTLNFNMLEALPEGLFQHLAALESLHLQGNQLQALPRRLFQPLTHLKTLNLAQNLLAQLPEELFHPLTSLQTLKLSNNALSGLPQGVFGKLGSLQELFLDSNNISELPPQVFSQLFCLERLWLQRNAITHLPLSIFASLGNLTFLSLQWNMLRVLPAGLFAHTPCLVGLSLTHNQLETVAEGTFAHLSNLRSLMLSYNAITHLPAGIFRDLEELVKLYLGSNNLTALHPALFQNL

SEQ ID NO: 80 - protein, 755 aa, Artificial Sequence
  hCPN1 variant
VTFRHHRYDDLVRTLYKVQNECPGITRVYSIGRSVEGRHLYVLEFSDHPGIHEPLEPEVKYVGNMHGNEALGRELMLQLSEFLCEEFRNRNQRIVQLIQDTRIHILPSMNPDGYEVAAAQGPNKPGYLVGRNNANGVDLNRNFPDLNTYIYYNEKYGGPNHHLPLPDNWKSQVEPETRAVIRWMHSFNFVLSANLHGGAVVANYPYDKSFEHRVRGVRRTASTPTPDDKLFQKLAKVYSYAHGWMFQGWNCGDYFPDGITNGASWYSLSKGMQDFNYLHTNCFEITLELSCDKFPPEEELQREWLGNREALIQFLEQVHQGIKGMVLDENYNNLANAVISVSGINHDVTSGDHGDYFRLLLPGIYTVSATAPGYDPETVTVTVGPAEPTLVNFHLKRSGSSGGSSGGSSGCPMGCDCFVQEVFCSDEELATVPLDIPPYTKNIIFVETSFTTLETRAFGSNPNLTKVVFLNTQLCQFRPDAFGGLPRLEDLEVTGSSFLNLSTNIFSNLTSLGKLTLNFNMLEALPEGLFQHLAALESLHLQGNQLQALPRRLFQPLTHLKTLNLAQNLLAQLPEELFHPLTSLQTLKLSNNALSGLPQGVFGKLGSLQELFLDSNNISELPPQVFSQLFCLERLWLQRNAITHLPLSIFASLGNLTFLSLQWNMLRVLPAGLFAHTPCLVGLSLTHNQLETVAEGTFAHLSNLRSLMLSYNAITHLPAGIFRDLEELVKLYLGSNNLTALHPALFQNLHHHHHH

SEQ ID NO: 81 - protein, 494 aa, Artificial Sequence
  hCPN1 variant
FQSGQVLAALPRTSRQVQVLQNLTTTYEIVLWQPVTADLIVKKKQVHFFVNASDVDNVKAHLNVSGIPCSVLLADVEDLIQQQISNDTVSPRASASVTFRHHRYDDLVRTLYKVQNECPGITRVYSIGRSVEGRHLYVLEFSDHPGIHEPLEPEVKYVGNMHGNEALGRELMLQLSEFLCEEFRNRNQRIVQLIQDTRIHILPSMNPDGYEVAAAQGPNKPGYLVGRNNANGVDLNRNFPDLNTYIYYNEKYGGPNHHLPLPDNWKSQVEPETRAVIRWMHSFNFVLSANLHGGAVVANYPYDKSFEHRVRGVRRTASTPTPDDKLFQKLAKVYSYAHGWMFQGWNCGDYFPDGITNGASWYSLSKGMQDFNYLHTNCFEITLELSCDKFPPEEELQREWLGNREALIQFLEQVHQGIKGMVLDENYNNLANAVISVSGINHDVTSGDHGDYFRLLLPGIYTVSATAPGYDPETVTVTVGPAEPTLVNFHLKRS

SEQ ID NO: 82 - protein, 500 aa, Artificial Sequence
  hCPN1 variant
FQSGQVLAALPRTSRQVQVLQNLTTTYEIVLWQPVTADLIVKKKQVHFFVNASDVDNVKAHLNVSGIPCSVLLADVEDLIQQQISNDTVSPRASASVTFRHHRYDDLVRTLYKVQNECPGITRVYSIGRSVEGRHLYVLEFSDHPGIHEPLEPEVKYVGNMHGNEALGRELMLQLSEFLCEEFRNRNQRIVQLIQDTRIHILPSMNPDGYEVAAAQGPNKPGYLVGRNNANGVDLNRNFPDLNTYIYYNEKYGGPNHHLPLPDNWKSQVEPETRAVIRWMHSFNFVLSANLHGGAVVANYPYDKSFEHRVRGVRRTASTPTPDDKLFQKLAKVYSYAHGWMFQGWNCGDYFPDGITNGASWYSLSKGMQDFNYLHTNCFEITLELSCDKFPPEEELQREWLGNREALIQFLEQVHQGIKGMVLDENYNNLANAVISVSGINHDVTSGDHGDYFRLLLPGIYTVSATAPGYDPETVTVTVGPAEPTLVNFHLKRSHHHHHH

SEQ ID NO: 83 - protein, 1091 aa, Artificial Sequence
  hCPN1 variant
FQSGQVLAALPRTSRQVQVLQNLTTTYEIVLWQPVTADLIVKKKQVHFFVNASDVDNVKAHLNVSGIPCSVLLADVEDLIQQQISNDTVSPRASASVTFRHHRYDDLVRTLYKVQNECPGITRVYSIGRSVEGRHLYVLEFSDHPGIHEPLEPEVKYVGNMHGNEALGRELMLQLSEFLCEEFRNRNQRIVQLIQDTRIHILPSMNPDGYEVAAAQGPNKPGYLVGRNNANGVDLNRNFPDLNTYIYYNEKYGGPNHHLPLPDNWKSQVEPETRAVIRWMHSFNFVLSANLHGGAVVANYPYDKSFEHRVRGVRRTASTPTPDDKLFQKLAKVYSYAHGWMFQGWNCGDYFPDGITNGASWYSLSKGMQDFNYLHTNCFEITLELSCDKFPPEEELQREWLGNREALIQFLEQVHQGIKGMVLDENYNNLANAVISVSGINHDVTSGDHGDYFRLLLPGIYTVSATAPGYDPETVTVTVGPAEPTLVNFHLKRSGSSGGSSGGSSGDAHKSEVAHRFKDLGEENFKALVLIAFAQYLQQCPFEDHVKLVNEVTEFAKTCVADESAENCDKSLHTLFGDKLCTVATLRETYGEMADCCAKQEPERNECFLQHKDDNPNLPRLVRPEVDVMCTAFHDNEETFLKKYLYEIARRHPYFYAPELLFFAKRYKAAFTECCQAADKAACLLPKLDELRDEGKASSAKQRLKCASLQKFGERAFKAWAVARLSQRFPKAEFAEVSKLVTDLTKVHTECCHGDLLECADDRADLAKYICENQDSISSKLKECCEKPLLEKSHCIAEVENDEMPADLPSLAADFVESKDVCKNYAEAKDVFLGMFLYEYARRHPDYSVVLLLRLAKTYETTLEKCCAAADPHECYAKVFDEFKPLVEEPQNLIKQNCELFEQLGEYKFQNALLVRYTKKVPQVSTPTLVEVSRNLGKVGSKCCKHPEAKRMPCAEDYLSVVLNQLCVLHEKTPVSDRVTKCCTESLVNRRPCFSALEVDETYVPKEFNAETFTFHADICTLSEKERQIKKQTALVELVKHKPKATKEQLKAVMDDFAAFVEKCCKADDKETCFAEEGKKLVAASQAALGL

SEQ ID NO: 84 - protein, 845 aa, Artificial Sequence
  hCPN1 variant
FQSGQVLAALPRTSRQVQVLQNLTTTYEIVLWQPVTADLIVKKKQVHFFVNASDVDNVKAHLNVSGIPCSVLLADVEDLIQQQISNDTVSPRASASVTFRHHRYDDLVRTLYKVQNECPGITRVYSIGRSVEGRHLYVLEFSDHPGIHEPLEPEVKYVGNMHGNEALGRELMLQLSEFLCEEFRNRNQRIVQLIQDTRIHILPSMNPDGYEVAAAQGPNKPGYLVGRNNANGVDLNRNFPDLNTYIYYNEKYGGPNHHLPLPDNWKSQVEPETRAVIRWMHSFNFVLSANLHGGAVVANYPYDKSFEHRVRGVRRTASTPTPDDKLFQKLAKVYSYAHGWMFQGWNCGDYFPDGITNGASWYSLSKGMQDFNYLHTNCFEITLELSCDKFPPEEELQREWLGNREALIQFLEQVHQGIKGMVLDENYNNLANAVISVSGINHDVTSGDHGDYFRLLLPGIYTVSATAPGYDPETVTVTVGPAEPTLVNFHLKRSGSSGGSSGGSSGCPMGCDCFVQEVFCSDEELATVPLDIPPYTKNIIFVETSFTTLETRAFGSNPNLTKVVFLNTQLCQFRPDAFGGLPRLEDLEVTGSSFLNLSTNIFSNLTSLGKLTLNFNMLEALPEGLFQHLAALESLHLQGNQLQALPRRLFQPLTHLKTLNLAQNLLAQLPEELFHPLTSLQTLKLSNNALSGLPQGVFGKLGSLQELFLDSNNISELPPQVFSQLFCLERLWLQRNAITHLPLSIFASLGNLTFLSLQWNMLRVLPAGLFAHTPCLVGLSLTHNQLETVAEGTFAHLSNLRSLMLSYNAITHLPAGIFRDLEELVKLYLGSNNLTALHPALFQNL

SEQ ID NO: 85 - protein, 851 aa, Artificial Sequence
  hCPN1 variant
FQSGQVLAALPRTSRQVQVLQNLTTTYEIVLWQPVTADLIVKKKQVHFFVNASDVDNVKAHLNVSGIPCSVLLADVEDLIQQQISNDTVSPRASASVTFRHHRYDDLVRTLYKVQNECPGITRVYSIGRSVEGRHLYVLEFSDHPGIHEPLEPEVKYVGNMHGNEALGRELMLQLSEFLCEEFRNRNQRIVQLIQDTRIHILPSMNPDGYEVAAAQGPNKPGYLVGRNNANGVDLNRNFPDLNTYIYYNEKYGGPNHHLPLPDNWKSQVEPETRAVIRWMHSFNFVLSANLHGGAVVANYPYDKSFEHRVRGVRRTASTPTPDDKLFQKLAKVYSYAHGWMFQGWNCGDYFPDGITNGASWYSLSKGMQDFNYLHTNCFEITLELSCDKFPPEEELQREWLGNREALIQFLEQVHQGIKGMVLDENYNNLANAVISVSGINHDVTSGDHGDYFRLLLPGIYTVSATAPGYDPETVTVTVGPAEPTLVNFHLKRSGSSGGSSGGSSGCPMGCDCFVQEVFCSDEELATVPLDIPPYTKNIIFVETSFTTLETRAFGSNPNLTKVVFLNTQLCQFRPDAFGGLPRLEDLEVTGSSFLNLSTNIFSNLTSLGKLTLNFNMLEALPEGLFQHLAALESLHLQGNQLQALPRRLFQPLTHLKTLNLAQNLLAQLPEELFHPLTSLQTLKLSNNALSGLPQGVFGKLGSLQELFLDSNNISELPPQVFSQLFCLERLWLQRNAITHLPLSIFASLGNLTFLSLQWNMLRVLPAGLFAHTPCLVGLSLTHNQLETVAEGTFAHLSNLRSLMLSYNAITHLPAGIFRDLEELVKLYLGSNNLTALHPALFQNLHHHHHH

SEQ ID NO: 86 - protein, 509 aa, Artificial Sequence
  hCPN1 variant
GHHHHHHHHHHGSLQDSEVNQEAKPEVKPEVKPETHINLKVSDGSSEIFFKIKKTTPLRRLMEAFAKRQGKEMDSLTFLYDGIEIQADQTPEDLDMEDNDIIEAHREQIGGVTFRHHRYDDLVRTLYKVQNECPGITRVYSIGRSVEGRHLYVLEFSDHPGIHEPLEPEVKYVGNMHGNEALGRELMLQLSEFLCEEFRNRNQRIVQLIQDTRIHILPSMNPDGYEVAAAQGPNKPGYLVGRNNANGVDLNRNFPDLNTYIYYNEKYGGPNHHLPLPDNWKSQVEPETRAVIRWMHSFNFVLSANLHGGAVVANYPYDKSFEHRVRGVRRTASTPTPDDKLFQKLAKVYSYAHGWMFQGWNCGDYFPDGITNGASWYSLSKGMQDFNYLHTNCFEITLELSCDKFPPEEELQREWLGNREALIQFLEQVHQGIKGMVLDENYNNLANAVISVSGINHDVTSGDHGDYFRLLLPGIYTVSATAPGYDPETVTVTVGPAEPTLVNFHLKRS

SEQ ID NO: 87 - protein, 1106 aa, Artificial Sequence
  hCPN1 variant
GHHHHHHHHHHGSLQDSEVNQEAKPEVKPEVKPETHINLKVSDGSSEIFFKIKKTTPLRRLMEAFAKRQGKEMDSLTFLYDGIEIQADQTPEDLDMEDNDIIEAHREQIGGVTFRHHRYDDLVRTLYKVQNECPGITRVYSIGRSVEGRHLYVLEFSDHPGIHEPLEPEVKYVGNMHGNEALGRELMLQLSEFLCEEFRNRNQRIVQLIQDTRIHILPSMNPDGYEVAAAQGPNKPGYLVGRNNANGVDLNRNFPDLNTYIYYNEKYGGPNHHLPLPDNWKSQVEPETRAVIRWMHSFNFVLSANLHGGAVVANYPYDKSFEHRVRGVRRTASTPTPDDKLFQKLAKVYSYAHGWMFQGWNCGDYFPDGITNGASWYSLSKGMQDFNYLHTNCFEITLELSCDKFPPEEELQREWLGNREALIQFLEQVHQGIKGMVLDENYNNLANAVISVSGINHDVTSGDHGDYFRLLLPGIYTVSATAPGYDPETVTVTVGPAEPTLVNFHLKRSGSSGGSSGGSSGDAHKSEVAHRFKDLGEENFKALVLIAFAQYLQQCPFEDHVKLVNEVTEFAKTCVADESAENCDKSLHTLFGDKLCTVATLRETYGEMADCCAKQEPERNECFLQHKDDNPNLPRLVRPEVDVMCTAFHDNEETFLKKYLYEIARRHPYFYAPELLFFAKRYKAAFTECCQAADKAACLLPKLDELRDEGKASSAKQRLKCASLQKFGERAFKAWAVARLSQRFPKAEFAEVSKLVTDLTKVHTECCHGDLLECADDRADLAKYICENQDSISSKLKECCEKPLLEKSHCIAEVENDEMPADLPSLAADFVESKDVCKNYAEAKDVFLGMFLYEYARRHPDYSVVLLLRLAKTYETTLEKCCAAADPHECYAKVFDEFKPLVEEPQNLIKQNCELFEQLGEYKFQNALLVRYTKKVPQVSTPTLVEVSRNLGKVGSKCCKHPEAKRMPCAEDYLSVVLNQLCVLHEKTPVSDRVTKCCTESLVNRRPCFSALEVDETYVPKEFNAETFTFHADICTLSEKERQIKKQTALVELVKHKPKATKEQLKAVMDDFAAFVEKCCKADDKETCFAEEGKKLVAASQAALGL

SEQ ID NO: 88 - protein, 431 aa, Artificial Sequence
  hCPN1 variant
GHHHHHHHHHHGSLQDSEVNQEAKPEVKPEVKPETHINLKVSDGSSEIFFKIKKTTPLRRLMEAFAKRQGKEMDSLTFLYDGIEIQADQTPEDLDMEDNDIIEAHREQIGGVTFRHHRYDDLVRTLYKVQNECPGITRVYSIGRSVEGRHLYVLEFSDHPGIHEPLEPEVKYVGNMHGNEALGRELMLQLSEFLCEEFRNRNQRIVQLIQDTRIHILPSMNPDGYEVAAAQGPNKPGYLVGRNNANGVDLNRNFPDLNTYIYYNEKYGGPNHHLPLPDNWKSQVEPETRAVIRWMHSFNFVLSANLHGGAVVANYPYDKSFEHRVRGVRRTASTPTPDDKLFQKLAKVYSYAHGWMFQGWNCGDYFPDGITNGASWYSLSKGMQDFNYLHTNCFEITLELSCDKFPPEEELQREWLGNREALIQFLEQVHQ

SEQ ID NO: 89 - protein, 1028 aa, Artificial Sequence
  hCPN1 variant
GHHHHHHHHHHGSLQDSEVNQEAKPEVKPEVKPETHINLKVSDGSSEIFFKIKKTTPLRRLMEAFAKRQGKEMDSLTFLYDGIEIQADQTPEDLDMEDNDIIEAHREQIGGVTFRHHRYDDLVRTLYKVQNECPGITRVYSIGRSVEGRHLYVLEFSDHPGIHEPLEPEVKYVGNMHGNEALGRELMLQLSEFLCEEFRNRNQRIVQLIQDTRIHILPSMNPDGYEVAAAQGPNKPGYLVGRNNANGVDLNRNFPDLNTYIYYNEKYGGPNHHLPLPDNWKSQVEPETRAVIRWMHSFNFVLSANLHGGAVVANYPYDKSFEHRVRGVRRTASTPTPDDKLFQKLAKVYSYAHGWMFQGWNCGDYFPDGITNGASWYSLSKGMQDFNYLHTNCFEITLELSCDKFPPEEELQREWLGNREALIQFLEQVHQGSSGGSSGGSSGDAHKSEVAHRFKDLGEENFKALVLIAFAQYLQQCPFEDHVKLVNEVTEFAKTCVADESAENCDKSLHTLFGDKLCTVATLRETYGEMADCCAKQEPERNECFLQHKDDNPNLPRLVRPEVDVMCTAFHDNEETFLKKYLYEIARRHPYFYAPELLFFAKRYKAAFTECCQAADKAACLLPKLDELRDEGKASSAKQRLKCASLQKFGERAFKAWAVARLSQRFPKAEFAEVSKLVTDLTKVHTECCHGDLLECADDRADLAKYICENQDSISSKLKECCEKPLLEKSHCIAEVENDEMPADLPSLAADFVESKDVCKNYAEAKDVFLGMFLYEYARRHPDYSVVLLLRLAKTYETTLEKCCAAADPHECYAKVFDEFKPLVEEPQNLIKQNCELFEQLGEYKFQNALLVRYTKKVPQVSTPTLVEVSRNLGKVGSKCCKHPEAKRMPCAEDYLSVVLNQLCVLHEKTPVSDRVTKCCTESLVNRRPCFSALEVDETYVPKEFNAETFTFHADICTLSEKERQIKKQTALVELVKHKPKATKEQLKAVMDDFAAFVEKCCKADDKETCFAEEGKKLVAASQAALGL

SEQ ID NO: 90 - protein, 320 aa, Artificial Sequence; identical to SEQ ID NO: 8
  hCPN1 variant

SEQ ID NO: 91 - protein, 917 aa, Artificial Sequence
  hCPN1 variant
VTFRHHRYDDLVRTLYKVQNECPGITRVYSIGRSVEGRHLYVLEFSDHPGIHEPLEPEVKYVGNMHGNEALGRELMLQLSEFLCEEFRNRNQRIVQLIQDTRIHILPSMNPDGYEVAAAQGPNKPGYLVGRNNANGVDLNRNFPDLNTYIYYNEKYGGPNHHLPLPDNWKSQVEPETRAVIRWMHSFNFVLSANLHGGAVVANYPYDKSFEHRVRGVRRTASTPTPDDKLFQKLAKVYSYAHGWMFQGWNCGDYFPDGITNGASWYSLSKGMQDFNYLHTNCFEITLELSCDKFPPEEELQREWLGNREALIQFLEQVHQGSSGGSSGGSSGDAHKSEVAHRFKDLGEENFKALVLIAFAQYLQQCPFEDHVKLVNEVTEFAKTCVADESAENCDKSLHTLFGDKLCTVATLRETYGEMADCCAKQEPERNECFLQHKDDNPNLPRLVRPEVDVMCTAFHDNEETFLKKYLYEIARRHPYFYAPELLFFAKRYKAAFTECCQAADKAACLLPKLDELRDEGKASSAKQRLKCASLQKFGERAFKAWAVARLSQRFPKAEFAEVSKLVTDLTKVHTECCHGDLLECADDRADLAKYICENQDSISSKLKECCEKPLLEKSHCIAEVENDEMPADLPSLAADFVESKDVCKNYAEAKDVFLGMFLYEYARRHPDYSVVLLLRLAKTYETTLEKCCAAADPHECYAKVFDEFKPLVEEPQNLIKQNCELFEQLGEYKFQNALLVRYTKKVPQVSTPTLVEVSRNLGKVGSKCCKHPEAKRMPCAEDYLSVVLNQLCVLHEKTPVSDRVTKCCTESLVNRRPCFSALEVDETYVPKEFNAETFTFHADICTLSEKERQIKKQTALVELVKHKPKATKEQLKAVMDDFAAFVEKCCKADDKETCFAEEGKKLVAASQAALGL

SEQ ID NO: 92 - protein, 1002 aa, Artificial Sequence
  hCPN1 variant
VTFRHHRYDDLVRTLYKVQNECPGITRVYSIGRSVEGRHLYVLEFSDHPGIHEPLEPEVKYVGNMHGNEALGRELMLQLSEFLCEEFRNRNQRIVQLIQDTRIHILPSMNPDGYEVAAAQGPNKPGYLVGRNNANGVDLNRNFPDLNTYIYYNEKYGGPNHHLPLPDNWKSQVEPETRAVIRWMHSFNFVLSANLHGGAVVANYPYDKSFEHRVRGVRRTASTPTPDDKLFQKLAKVYSYAHGWMFQGWNCGDYFPDGITNGASWYSLSKGMQDFNYLHTNCFEITLELSCDKFPPEEELQREWLGNREALIQFLEQVHQGIKGMVLDENYNNLANAVISVSGINHDVTSGDHGDYFRLLLPGIYTVSATAPGYDPETVTVTVGPAEPTLVNFHLKRSENLYFQGGSSGGSSGGSSGDAHKSEVAHRFKDLGEENFKALVLIAFAQYLQQCPFEDHVKLVNEVTEFAKTCVADESAENCDKSLHTLFGDKLCTVATLRETYGEMADCCAKQEPERNECFLQHKDDNPNLPRLVRPEVDVMCTAFHDNEETFLKKYLYEIARRHPYFYAPELLFFAKRYKAAFTECCQAADKAACLLPKLDELRDEGKASSAKQRLKCASLQKFGERAFKAWAVARLSQRFPKAEFAEVSKLVTDLTKVHTECCHGDLLECADDRADLAKYICENQDSISSKLKECCEKPLLEKSHCIAEVENDEMPADLPSLAADFVESKDVCKNYAEAKDVFLGMFLYEYARRHPDYSVVLLLRLAKTYETTLEKCCAAADPHECYAKVFDEFKPLVEEPQNLIKQNCELFEQLGEYKFQNALLVRYTKKVPQVSTPTLVEVSRNLGKVGSKCCKHPEAKRMPCAEDYLSVVLNQLCVLHEKTPVSDRVTKCCTESLVNRRPCFSALEVDETYVPKEFNAETFTFHADICTLSEKERQIKKQTALVELVKHKPKATKEQLKAVMDDFAAFVEKCCKADDKETCFAEEGKKLVAASQAALGL

SEQ ID NO: 93 - protein, 1010 aa, Artificial Sequence
  hCPN1 variant
VTFRHHRYDDLVRTLYKVQNECPGITRVYSIGRSVEGRHLYVLEFSDHPGIHEPLEPEVKYVGNMHGNEALGRELMLQLSEFLCEEFRNRNQRIVQLIQDTRIHILPSMNPDGYEVAAAQGPNKPGYLVGRNNANGVDLNRNFPDLNTYIYYNEKYGGPNHHLPLPDNWKSQVEPETRAVIRWMHSFNFVLSANLHGGAVVANYPYDKSFEHRVRGVRRTASTPTPDDKLFQKLAKVYSYAHGWMFQGWNCGDYFPDGITNGASWYSLSKGMQDFNYLHTNCFEITLELSCDKFPPEEELQREWLGNREALIQFLEQVHQGIKGMVLDENYNNLANAVISVSGINHDVTSGDHGDYFRLLLPGIYTVSATAPGYDPETVTVTVGPAEPTLVNFHLKRSENLYFQGGSSGGSSGGSSGGSSGGSSGDAHKSEVAHRFKDLGEENFKALVLIAFAQYLQQCPFEDHVKLVNEVTEFAKTCVADESAENCDKSLHTLFGDKLCTVATLRETYGEMADCCAKQEPERNECFLQHKDDNPNLPRLVRPEVDVMCTAFHDNEETFLKKYLYEIARRHPYFYAPELLFFAKRYKAAFTECCQAADKAACLLPKLDELRDEGKASSAKQRLKCASLQKFGERAFKAWAVARLSQRFPKAEFAEVSKLVTDLTKVHTECCHGDLLECADDRADLAKYICENQDSISSKLKECCEKPLLEKSHCIAEVENDEMPADLPSLAADFVESKDVCKNYAEAKDVFLGMFLYEYARRHPDYSVVLLLRLAKTYETTLEKCCAAADPHECYAKVFDEFKPLVEEPQNLIKQNCELFEQLGEYKFQNALLVRYTKKVPQVSTPTLVEVSRNLGKVGSKCCKHPEAKRMPCAEDYLSVVLNQLCVLHEKTPVSDRVTKCCTESLVNRRPCFSALEVDETYVPKEFNAETFTFHADICTLSEKERQIKKQTALVELVKHKPKATKEQLKAVMDDFAAFVEKCCKADDKETCFAEEGKKLVAASQAALGL

SEQ ID NO: 94 - protein, 642 aa, Artificial Sequence
  hCPN1 variant
VTFRHHRYDDLVRTLYKVQNECPGITRVYSIGRSVEGRHLYVLEFSDHPGIHEPLEPEVKYVGNMHGNEALGRELMLQLSEFLCEEFRNRNQRIVQLIQDTRIHILPSMNPDGYEVAAAQGPNKPGYLVGRNNANGVDLNRNFPDLNTYIYYNEKYGGPNHHLPLPDNWKSQVEPETRAVIRWMHSFNFVLSANLHGGAVVANYPYDKSFEHRVRGVRRTASTPTPDDKLFQKLAKVYSYAHGWMFQGWNCGDYFPDGITNGASWYSLSKGMQDFNYLHTNCFEITLELSCDKFPPEEELQREWLGNREALIQFLEQVHQGIKGMVLDENYNNLANAVISVSGINHDVTSGDHGDYFRLLLPGIYTVSATAPGYDPETVTVTVGPAEPTLVNFHLKRSENLYFQGGSSGGSSGGSSGTHTCPPCPAPEAAGGPSVFLFPPKPKDTLMISRTPEVTCVVVDVSHEDPEVKFNWYVDGVEVHNAKTKPREEQYNSTYRVVSVLTVLHQDWLNGKEYKCKVSNKALGAPIEKTISKAKGQPREPQVYTLPPSRDELTKNQVSLTCLVKGFYPSDIAVEWESNGQPENNYKTTPPVLDSDGSFFLYSKLTVDKSRWQQGNVFSCSVMHEALHNHYTQKSLSLSPGK

SEQ ID NO: 95 - protein, 639 aa, Artificial Sequence
  hCPN1 variant
VTFRHHRYDDLVRTLYKVQNECPGITRVYSIGRSVEGGHLYVLEFSDHPGIHEPLEPEVKYVGNMHGNEALGRELMLQLSEFLCEEFRNRNQRIVQLIQDTRIHILPSMNPDGYEVAAAQGPNKPGYLVGRNNANGVDLNRNFPDLNTYIYYNEKYGGPNHHLPLPDNWKSQVEPETRAVIRWMHSFNFVLSANLHGGAVVANYPYDKSFEHRVRGVRRTASTPTPDDKLFQKLAKVYSYAHGWMFQGWNCGDYFPDGITNGASWYSLSKGMQDFNYLHTNCFEITLELSCDKFPPEEELQREWLGNREALIQFLEQVHQGIKGMVLDENYNNLANAVISVSGINHDVTSGDHGDYFRLLLPGIYTVSATAPGYDPETVTVTVGPAEPTLVNFHLKRSAEGRGSSGGSSGGSSGTHTCPPCPAPEAAGGPSVFLFPPKPKDTLMISRTPEVTCVVVDVSHEDPEVKFNWYVDGVEVHNAKTKPREEQYNSTYRVVSVLTVLHQDWLNGKEYKCKVSNKALGAPIEKTISKAKGQPREPQVYTLPPSRDELTKNQVSLTCLVKGFYPSDIAVEWESNGQPENNYKTTPPVLDSDGSFFLYSKLTVDKSRWQQGNVFSCSVMHEALHNHYTQKSLSLSPGK

SEQ ID NO: 96 - protein, 999 aa, Artificial Sequence
  hCPN1 variant
VTFRHHRYDDLVRTLYKVQNECPGITRVYSIGRSVEGGHLYVLEFSDHPGIHEPLEPEVKYVGNMHGNEALGRELMLQLSEFLCEEFRNRNQRIVQLIQDTRIHILPSMNPDGYEVAAAQGPNKPGYLVGRNNANGVDLNRNFPDLNTYIYYNEKYGGPNHHLPLPDNWKSQVEPETRAVIRWMHSFNFVLSANLHGGAVVANYPYDKSFEHRVRGVRRTASTPTPDDKLFQKLAKVYSYAHGWMFQGWNCGDYFPDGITNGASWYSLSKGMQDFNYLHTNCFEITLELSCDKFPPEEELQREWLGNREALIQFLEQVHQGIKGMVLDENYNNLANAVISVSGINHDVTSGDHGDYFRLLLPGIYTVSATAPGYDPETVTVTVGPAEPTLVNFHLKRSVEGRGSSGGSSGGSSGDAHKSEVAHRFKDLGEENFKALVLIAFAQYLQQCPFEDHVKLVNEVTEFAKTCVADESAENCDKSLHTLFGDKLCTVATLRETYGEMADCCAKQEPERNECFLQHKDDNPNLPRLVRPEVDVMCTAFHDNEETFLKKYLYEIARRHPYFYAPELLFFAKRYKAAFTECCQAADKAACLLPKLDELRDEGKASSAKQRLKCASLQKFGERAFKAWAVARLSQRFPKAEFAEVSKLVTDLTKVHTECCHGDLLECADDRADLAKYICENQDSISSKLKECCEKPLLEKSHCIAEVENDEMPADLPSLAADFVESKDVCKNYAEAKDVFLGMFLYEYARRHPDYSVVLLLRLAKTYETTLEKCCAAADPHECYAKVFDEFKPLVEEPQNLIKQNCELFEQLGEYKFQNALLVRYTKKVPQVSTPTLVEVSRNLGKVGSKCCKHPEAKRMPCAEDYLSVVLNQLCVLHEKTPVSDRVTKCCTESLVNRRPCFSALEVDETYVPKEFNAETFTFHADICTLSEKERQIKKQTALVELVKHKPKATKEQLKAVMDDFAAFVEKCCKADDKETCFAEEGKKLVAASQAALGL

SEQ ID NO: 97 - protein, 1379 aa, Artificial Sequence
  hCPN1 variant
KTEEGKLVIWINGDKGYNGLAEVGKKFEKDTGIKVTVEHPDKLEEKFPQVAATGDGPDIIFWAHDRFGGYAQSGLLAEITPAAAFQDKLYPFTWDAVRYNGKLIAYPIAVEALSLIYNKDLLPNPPKTWEEIPALDKELKAKGKSALMFNLQEPYFTWPLIAADGGYAFKYAAGKYDIKDVGVDNAGAKAGLTFLVDLIKNKHMNADTDYSIAEHAFNHGETAMTINGPWAWSNIDTSAVNYGVTVLPTFKGQPSKPFVGVLSAGINAASPNKELAKEFLENYLLTDEGLEAVNKDKPLGAVALKSYEEELVKDPRVAATMENAQKGEIMPNIPQMSAFWYAVRTAVINAASGRQTVDAALAAAQTNAAAASSASLEENLYFQGVTFRHHRYDDLVRTLYKVQNECPGITRVYSIGRSVEGRHLYVLEFSDHPGIHEPLEPEVKYVGNMHGNEALGRELMLQLSEFLCEEFRNRNQRIVQLIQDTRIHILPSMNPDGYEVAAAQGPNKPGYLVGRNNANGVDLNRNFPDLNTYIYYNEKYGGPNHHLPLPDNWKSQVEPETRAVIRWMHSFNFVLSANLHGGAVVANYPYDKSFEHRVRGVRRTASTPTPDDKLFQKLAKVYSYAHGWMFQGWNCGDYFPDGITNGASWYSLSKGMQDFNYLHTNCFEITLELSCDKFPPEEELQREWLGNREALIQFLEQVHQGIKGMVLDENYNNLANAVISVSGINHDVTSGDHGDYFRLLLPGIYTVSATAPGYDPETVTVTVGPAEPTLVNFHLKRSGSSGGSSGGSSGDAHKSEVAHRFKDLGEENFKALVLIAFAQYLQQCPFEDHVKLVNEVTEFAKTCVADESAENCDKSLHTLFGDKLCTVATLRETYGEMADCCAKQEPERNECFLQHKDDNPNLPRLVRPEVDVMCTAFHDNEETFLKKYLYEIARRHPYFYAPELLFFAKRYKAAFTECCQAADKAACLLPKLDELRDEGKASSAKQRLKCASLQKFGERAFKAWAVARLSQRFPKAEFAEVSKLVTDLTKVHTECCHGDLLECADDRADLAKYICENQDSISSKLKECCEKPLLEKSHCIAEVENDEMPADLPSLAADFVESKDVCKNYAEAKDVFLGMFLYEYARRHPDYSVVLLLRLAKTYETTLEKCCAAADPHECYAKVFDEFKPLVEEPQNLIKQNCELFEQLGEYKFQNALLVRYTKKVPQVSTPTLVEVSRNLGKVGSKCCKHPEAKRMPCAEDYLSVVLNQLCVLHEKTPVSDRVTKCCTESLVNRRPCFSALEVDETYVPKEFNAETFTFHADICTLSEKERQIKKQTALVELVKHKPKATKEQLKAVMDDFAAFVEKCCKADDKETCFAEEGKKLVAASQAALGL

SEQ ID NO: 98 - protein, 782 aa, Artificial Sequence
  hCPN1 variant
KTEEGKLVIWINGDKGYNGLAEVGKKFEKDTGIKVTVEHPDKLEEKFPQVAATGDGPDIIFWAHDRFGGYAQSGLLAEITPAAAFQDKLYPFTWDAVRYNGKLIAYPIAVEALSLIYNKDLLPNPPKTWEEIPALDKELKAKGKSALMFNLQEPYFTWPLIAADGGYAFKYAAGKYDIKDVGVDNAGAKAGLTFLVDLIKNKHMNADTDYSIAEHAFNHGETAMTINGPWAWSNIDTSAVNYGVTVLPTFKGQPSKPFVGVLSAGINAASPNKELAKEFLENYLLTDEGLEAVNKDKPLGAVALKSYEEELVKDPRVAATMENAQKGEIMPNIPQMSAFWYAVRTAVINAASGRQTVDAALAAAQTNAAAASSASLEENLYFQGVTFRHHRYDDLVRTLYKVQNECPGITRVYSIGRSVEGRHLYVLEFSDHPGIHEPLEPEVKYVGNMHGNEALGRELMLQLSEFLCEEFRNRNQRIVQLIQDTRIHILPSMNPDGYEVAAAQGPNKPGYLVGRNNANGVDLNRNFPDLNTYIYYNEKYGGPNHHLPLPDNWKSQVEPETRAVIRWMHSFNFVLSANLHGGAVVANYPYDKSFEHRVRGVRRTASTPTPDDKLFQKLAKVYSYAHGWMFQGWNCGDYFPDGITNGASWYSLSKGMQDFNYLHTNCFEITLELSCDKFPPEEELQREWLGNREALIQFLEQVHQGIKGMVLDENYNNLANAVISVSGINHDVTSGDHGDYFRLLLPGIYTVSATAPGYDPETVTVTVGPAEPTLVNFHLKRS

SEQ ID NO: 99 - protein, 1236 aa, Artificial Sequence
  hCPN1 variant
MSPILGYWKIKGLVQPTRLLLEYLEEKYEEHLYERDEGDKWRNKKFELGLEFPNLPYYIDGDVKLTQSMAIIRYIADKHNMLGGCPKERAEISMLEGAVLDIRYGVSRIAYSKDFETLKVDFLSKLPEMLKMFEDRLCHKTYLNGDHVTHPDFMLYDALDVVLYMDPMCLDAFPKLVCFKKRIEAIPQIDKYLKSSKYIAWPLQGWQATFGGGDHPPKAAAQTNAAAASSASLEENLYFQGVTFRHHRYDDLVRTLYKVQNECPGITRVYSIGRSVEGRHLYVLEFSDHPGIHEPLEPEVKYVGNMHGNEALGRELMLQLSEFLCEEFRNRNQRIVQLIQDTRIHILPSMNPDGYEVAAAQGPNKPGYLVGRNNANGVDLNRNFPDLNTYIYYNEKYGGPNHHLPLPDNWKSQVEPETRAVIRWMHSFNFVLSANLHGGAVVANYPYDKSFEHRVRGVRRTASTPTPDDKLFQKLAKVYSYAHGWMFQGWNCGDYFPDGITNGASWYSLSKGMQDFNYLHTNCFEITLELSCDKFPPEEELQREWLGNREALIQFLEQVHQGIKGMVLDENYNNLANAVISVSGINHDVTSGDHGDYFRLLLPGIYTVSATAPGYDPETVTVTVGPAEPTLVNFHLKRSGSSGGSSGGSSGDAHKSEVAHRFKDLGEENFKALVLIAFAQYLQQCPFEDHVKLVNEVTEFAKTCVADESAENCDKSLHTLFGDKLCTVATLRETYGEMADCCAKQEPERNECFLQHKDDNPNLPRLVRPEVDVMCTAFHDNEETFLKKYLYEIARRHPYFYAPELLFFAKRYKAAFTECCQAADKAACLLPKLDELRDEGKASSAKQRLKCASLQKFGERAFKAWAVARLSQRFPKAEFAEVSKLVTDLTKVHTECCHGDLLECADDRADLAKYICENQDSISSKLKECCEKPLLEKSHCIAEVENDEMPADLPSLAADFVESKDVCKNYAEAKDVFLGMFLYEYARRHPDYSVVLLLRLAKTYETTLEKCCAAADPHECYAKVFDEFKPLVEEPQNLIKQNCELFEQLGEYKFQNALLVRYTKKVPQVSTPTLVEVSRNLGKVGSKCCKHPEAKRMPCAEDYLSVVLNQLCVLHEKTPVSDRVTKCCTESLVNRRPCFSALEVDETYVPKEFNAETFTFHADICTLSEKERQIKKQTALVELVKHKPKATKEQLKAVMDDFAAFVEKCCKADDKETCFAEEGKKLVAASQAALGL

SEQ ID NO: 100 - protein, 874 aa, Artificial Sequence
  hCPN1 variant
VTFRHHRYDDLVRTLYKVQNECPGITRVYSIGRSVEGRHLYVLEFSDHPGIHEPLEPEVKYVGNMHGNEALGRELMLQLSEFLCEEFRNRNQRIVQLIQDTRIHILPSMNPDGYEVAAAQGPNKPGYLVGRNNANGVDLNRNFPDLNTYIYYNEKYGGPNHHLPLPDNWKSQVEPETRAVIRWMHSFNFVLSANLHGGAVVANYPYDKSFEHRVRGVRRTASTPTPDDKLFQKLAKVYSYAHGWMFQGWNCGDYFPDGITNGASWYSLSKGMQDFNYLHTNCFEITLELSCDKFPPEEELQREWLGNREALIQFLEQVHQGIKGMVLDENYNNLANAVISVSGINHDVTSGDHGDYFRLLLPGIYTVSATAPGYDPETVTVTVGPAEPTLVNFHLKRSGSSGGSSGGSSGGSSGGSSGCPMGCDCFVQEVFCSDEELATVPLDIPPYTKNIIFVETSFTTLETRAFGSNPNLTKVVFLNTQLCQFRPDAFGGLPRLEDLEVTGSSFLNLSTNIFSNLTSLGKLTLNFNMLEALPEGLFQHLAALESLHLQGNQLQALPRRLFQPLTHLKTLNLAQNLLAQLPEELFHPLTSLQTLKLSNNALSGLPQGVFGKLGSLQELFLDSNNISELPPQVFSQLFCLERLWLQRNAITHLPLSIFASLGNLTFLSLQWNMLRVLPAGLFAHTPCLVGLSLTHNQLETVAEGTFAHLSNLRSLMLSYNAITHLPAGIFRDLEELVKLYLGSNNLTALHPALFQNLSKLELLSLSKNQLTTLPEGIFDTNYNLFNLALHGNPWQCDCHLAYLFNWLQQYTDRLLNIQTYCAGPAYLKGQVVPALNEKQLVCPVTRDHLGFQVTWPDESKAGGSWDLAVQERAA

SEQ ID NO: 101 - protein, 456 aa, Artificial Sequence; identical to SEQ ID NO: 14
  hCPN1 variant

SEQ ID NO: 102 - protein, 524 aa, Artificial Sequence; identical to SEQ ID NO: 13
  hCPN1 variant

SEQ ID NO: 103 - protein, 320 aa, Artificial Sequence
  hCPN1 variant
VTFRHHRYDDLVRTLYKVQNECPGITRVYSIGRSVEGRHLYVLEFSDHPGIHEPNEPEVKYVGNMHGNEALGRELMLQLSEFLCEEFRNRNQRIVQLIQDTRIHILPSMNPDGYEVAAAQGPNKPGYLVGRNNANGVDLNRNFPDLNTYIYYNEKYGGPNRHLPLPDNWKSQVEPETRAVIRWMHSFDFKLSANLHGGAVVANYPYDKSFEHRVRGVRRTASTPTPDDEWFQKLAKVYSYAHGWMFQGWNCGDYFPDGITNGASWYSLSKGMQDFNYLHTDSYEITLELSCDKFPPEEELQREWLGNKEALIQFLEQVHN

SEQ ID NO: 104 - protein, 320 aa, Artificial Sequence
  hCPN1 variant
VTFRHHRYDDLVRTLYKVQNECPGITRVYSIGRSVEGRHLYVLEFSDHPGIHEPNEPEVKYVGNMHGNEALGRELMLQLSEFLCEEFRNRNQRIVQLIQDTRIHILPSMNPDGYEVAAAQGPNKPGYLVGRNNANGVDLNRNFPDLNTYIYYNEKYGGPNSHLPLPDNWKSQVEPETRAVIRWMHSFDFRLSANLHGGAVVANYPYDKSFEHRVRGVRRTASTPTPDDEWFQKLAKVYSYAHGWMFQGWNCGDYFPDGITNGASWYSLSKGMQDFNYLHTNSYEITLELSCDKFPPEEELQREWLGNKEALIQFLEQVHN

SEQ ID NO: 105 - protein, 320 aa, Artificial Sequence
  hCPN1 variant
VTFRHHRYDDLVRTLYKVQNECPGITRVYSIGRSVEGRHLYVLEFSDHPGIHEPNEPEVKYVGNMHGNEALGRELMLQLSEFLCEEFRNRNQRIVQLIQDTRIHILPSMNPDGYEVAAAQGPNKPGYLVGRNNANGVDLNRNFPDLNTYIYYNEKYGGPNKHLPLPDNWKSQVEPETRAVIRWMHSFDFKLSANLHGGAVVANYPYDKSFEHRVRGVRRTASTPTPDDEWFQKLAKVYSYAHGWMFQGWNCGDYFPDGITNGASWYSLSKGMQDFNYLHTNSYEITLELSCDKFPPEEELQREWLGNKEALIQFLEQVHN

SEQ ID NO: 106 - protein, 320 aa, Artificial Sequence
  hCPN1 variant
VTFRHHRYDDLVRTLYKVQNECPGITRVYSIGRSVEGRHLYVLEFSDHPGIHEPNEPEVKYVGNMHGNEALGRELMLQLSEFLCEEFRNRNQRIVQLIQDTRIHILPSMNPDGYEVAAAQGPNKPGYLVGRNNANGVDLNRNFPDLNTYIYYNEKYGGPNSHLPLPDNWKSQVEPETRAVIRWMHSFDFRLSANLHGGAVVANYPYDKSFEHRVRGVRRTASTPTPDDEKFQDLAKVYSYAHGWMFQGWNCGDYFPDGITNGASWYSLSKGMQDFNYLHTNSYEITLELSCDKFPPEEELQREWLGNKEALIQFLEQVHK

SEQ ID NO: 107 - protein, 320 aa, Artificial Sequence
  hCPN1 variant
VTFRHHRYDDLVRTLYKVQNECPGITRVYSIGRSVEGRHLYVLEFSDHPGIHEPNEPEVKYVGNMHGNEALGRELMLQLSEFLCEEFRNRNQRIVQLIQDTRIHILPSMNPDGYEVAAAQGPNKPGYLVGRNNANGVDLNRNFPDLNTYIYYNEKYGGPNRHLPLPDNWKSQVEPETRAVIRWMHSFDFKLSANLHGGAVVANYPYDKSFEHRVRGVRRTASTPTPDDEWFQHLAKVYSYAHGWMFQGWNCGDYFPDGITNGASWYSLSKGMQDFNYLHTDSYEITLELSCDKFPPEEELQREWLGNKEALIQFLEQVHN

SEQ ID NO: 108 - protein, 320 aa, Artificial Sequence
  hCPN1 variant
VTFRHHRYDDLVRTLYKVQNECPGITRVYSIGRSVEGRHLYVLEFSDHPGIHEPNEPEVKYVGNMHGNEALGRELMLQLSEFLCEEFRNRNQRIVQLIQDTRIHILPSMNPDGYEVAAAQGPNKPGYLVGRNNANGVDLNRNFPDLNTYIYYNEKYGGPNRHLPLPDNWKSQVEPETRAVIRWMHSFDFKLSANLHGGAVVANYPYDKSFEHRVRGVRRTASTPTPDDEKFQKLAKVYSYAHGWMFQGWNCGDYFPDGITNGASWYSLSKGMQDFNYLHTDSYEITLELSCDKFPPEEELQREWLGNKEALIQFLEQVHN

SEQ ID NO: 109 - protein, 438 aa, Artificial Sequence; identical to SEQ ID NO: 6
  hCPN1 variant

SEQ ID NO: 110 - protein, 1035 aa, Artificial Sequence
  hCPN1 variant
VTFRHHRYDDLVRTLYKVQNECPGITRVYSIGRSVEGRHLYVLEFSDHPGIHEPLEPEVKYVGNMHGNEALGRELMLQLSEFLCEEFRNRNQRIVQLIQDTRIHILPSMNPDGYEVAAAQGPNKPGYLVGRNNANGVDLNRNFPDLNTYIYYNEKYGGPNHHLPLPDNWKSQVEPETRAVIRWMHSFNFVLSANLHGGAVVANYPYDKSFEHRVRGVRRTASTPTPDDKLFQKLAKVYSYAHGWMFQGWNCGDYFPDGITNGASWYSLSKGMQDFNYLHTNCFEITLELSCDKFPPEEELQREWLGNREALIQFLEQVHQGIKGMVLDENYNNLANAVISVSGINHDVTSGDHGDYFRLLLPGIYTVSATAPGYDPETVTVTVGPAEPTLVNFHLKRSIPQVSPVRRAPSRRHGVRAKVQPQARKKEMEMRQLQRGPAGSSGGSSGGSSGDAHKSEVAHRFKDLGEENFKALVLIAFAQYLQQCPFEDHVKLVNEVTEFAKTCVADESAENCDKSLHTLFGDKLCTVATLRETYGEMADCCAKQEPERNECFLQHKDDNPNLPRLVRPEVDVMCTAFHDNEETFLKKYLYEIARRHPYFYAPELLFFAKRYKAAFTECCQAADKAACLLPKLDELRDEGKASSAKQRLKCASLQKFGERAFKAWAVARLSQRFPKAEFAEVSKLVTDLTKVHTECCHGDLLECADDRADLAKYICENQDSISSKLKECCEKPLLEKSHCIAEVENDEMPADLPSLAADFVESKDVCKNYAEAKDVFLGMFLYEYARRHPDYSVVLLLRLAKTYETTLEKCCAAADPHECYAKVFDEFKPLVEEPQNLIKQNCELFEQLGEYKFQNALLVRYTKKVPQVSTPTLVEVSRNLGKVGSKCCKHPEAKRMPCAEDYLSVVLNQLCVLHEKTPVSDRVTKCCTESLVNRRPCFSALEVDETYVPKEFNAETFTFHADICTLSEKERQIKKQTALVELVKHKPKATKEQLKAVMDDFAAFVEKCCKADDKETCFAEEGKKLVAASQAALGL

SEQ ID NO: 111 - protein, 914 aa, Artificial Sequence
  hCPN1 variant
VTFRHHRYDDLVRTLYKVQNECPGITRVYSIGRSVEGRHLYVLEFSDHPGIHEPLEPEVKYVGNMHGNEALGRELMLQLSEFLCEEFRNRNQRIVQLIQDTRIHILPSMNPDGYEVAAAQGPNKPGYLVGRNNANGVDLNRNFPDLNTYIYYNEKYGGPNHHLPLPDNWKSQVEPETRAVIRWMHSFNFVLSANLHGGAVVANYPYDKSFEHRVRGVRRTASTPTPDDKLFQKLAKVYSYAHGWMFQGWNCGDYFPDGITNGASWYSLSKGMQDFNYLHTNCFEITLELSCDKFPPEEELQREWLGNREALIQFLEQVHQGIKGMVLDENYNNLANAVISVSGINHDVTSGDHGDYFRLLLPGIYTVSATAPGYDPETVTVTVGPAEPTLVNFHLKRSIPQVSPVRRAPSRRHGVRAKVQPQARKKEMEMRQLQRGPAGSSGGSSGGSSGGSSGGSSGCPMGCDCFVQEVFCSDEELATVPLDIPPYTKNIIFVETSFTTLETRAFGSNPNLTKVVFLNTQLCQFRPDAFGGLPRLEDLEVTGSSFLNLSTNIFSNLTSLGKLTLNFNMLEALPEGLFQHLAALESLHLQGNQLQALPRRLFQPLTHLKTLNLAQNLLAQLPEELFHPLTSLQTLKLSNNALSGLPQGVFGKLGSLQELFLDSNNISELPPQVFSQLFCLERLWLQRNAITHLPLSIFASLGNLTFLSLQWNMLRVLPAGLFAHTPCLVGLSLTHNQLETVAEGTFAHLSNLRSLMLSYNAITHLPAGIFRDLEELVKLYLGSNNLTALHPALFQNLSKLELLSLSKNQLTTLPEGIFDTNYNLFNLALHGNPWQCDCHLAYLFNWLQQYTDRLLNIQTYCAGPAYLKGQVVPALNEKQLVCPVTRDHLGFQVTWPDESKAGGSWDLAVQERAA

SEQ ID NO: 112 - protein, 982 aa, Artificial Sequence
  hCPN1 variant
VTFRHHRYDDLVRTLYKVQNECPGITRVYSIGRSVEGRHLYVLEFSDHPGIHEPLEPEVKYVGNMHGNEALGRELMLQLSEFLCEEFRNRNQRIVQLIQDTRIHILPSMNPDGYEVAAAQGPNKPGYLVGRNNANGVDLNRNFPDLNTYIYYNEKYGGPNHHLPLPDNWKSQVEPETRAVIRWMHSFNFVLSANLHGGAVVANYPYDKSFEHRVRGVRRTASTPTPDDKLFQKLAKVYSYAHGWMFQGWNCGDYFPDGITNGASWYSLSKGMQDFNYLHTNCFEITLELSCDKFPPEEELQREWLGNREALIQFLEQVHQGIKGMVLDENYNNLANAVISVSGINHDVTSGDHGDYFRLLLPGIYTVSATAPGYDPETVTVTVGPAEPTLVNFHLKRSIPQVSPVRRAPSRRHGVRAKVQPQARKKEMEMRQLQRGPAGSSGGSSGGSSGGSSGGSSGCPMGCDCFVQEVFCSDEELATVPLDIPPYTKNIIFVETSFTTLETRAFGSNPNLTKVVFLNTQLCQFRPDAFGGLPRLEDLEVTGSSFLNLSTNIFSNLTSLGKLTLNFNMLEALPEGLFQHLAALESLHLQGNQLQALPRRLFQPLTHLKTLNLAQNLLAQLPEELFHPLTSLQTLKLSNNALSGLPQGVFGKLGSLQELFLDSNNISELPPQVFSQLFCLERLWLQRNAITHLPLSIFASLGNLTFLSLQWNMLRVLPAGLFAHTPCLVGLSLTHNQLETVAEGTFAHLSNLRSLMLSYNAITHLPAGIFRDLEELVKLYLGSNNLTALHPALFQNLSKLELLSLSKNQLTTLPEGIFDTNYNLFNLALHGNPWQCDCHLAYLFNWLQQYTDRLLNIQTYCAGPAYLKGQVVPALNEKQLVCPVTRDHLGFQVTWPDESKAGGSWDLAVQERAARSQCTYSNPEGTVVLACDQAQCRWLNVQLSPQQGSLGLQYNASQEWDLRSSCGSLRLTVSIEARAAGP

SEQ ID NO: 113 - protein, 852 aa, Artificial Sequence
  hCPN1 variant
VTFRHHRYDDLVRTLYKVQNECPGITRVYSIGRSVEGRHLYVLEFSDHPGIHEPLEPEVKYVGNMHGNEALGRELMLQLSEFLCEEFRNRNQRIVQLIQDTRIHILPSMNPDGYEVAAAQGPNKPGYLVGRNNANGVDLNRNFPDLNTYIYYNEKYGGPNHHLPLPDNWKSQVEPETRAVIRWMHSFNFVLSANLHGGAVVANYPYDKSFEHRVRGVRRTASTPTPDDKLFQKLAKVYSYAHGWMFQGWNCGDYFPDGITNGASWYSLSKGMQDFNYLHTNCFEITLELSCDKFPPEEELQREWLGNKEALIQFLEQVHQGIKGMVLDQNYNNLANAVISVSGINHDVTSGDHGDYFRLLLPGIYTVSATAPGYDPETVTVTVGPAEPTLVNFHLKRGGSSGGSSGGSSGGSSGGSSGGSSGGSSGGSCPMGCDCFVQEVFCSDEELATVPLDIPPYTKNIIFVETSFTTLETRAFGSNPNLTKVVFLNTQLCQFRPDAFGGLPRLEDLEVTGSSFLNLSTNIFSNLTSLGKLTLNFNMLEALPEGLFQHLAALESLHLQGNQLQALPRRLFQPLTHLKTLNLAQNLLAQLPEELFHPLTSLQTLKLSNNALSGLPQGVFGKLGSLQELFLDSNNISELPPQVFSQLFCLERLWLQRNAITHLPLSIFASLGNLTFLSLQWNMLRVLPAGLFAHTPCLVGLSLTHNQLETVAEGTFAHLSNLRSLMLSYNAITHLPAGIFRDLEELVKLYLGSNNLTALHPALFQNLSKLELLSLSKNQLTTLPEGIFDTNYNLFNLALHGNPWQCDCHLAYLFNWLQQYTDRLLNIQTYCAGPAYLKGQVVPALNEKQLVC

SEQ ID NO: 114 - protein, 843 aa, Artificial Sequence
  hCPN1 variant
VTFRHHRYDDLVRTLYKVQNECPGITRVYSIGRSVEGRHLYVLEFSDHPGIHEPLEPEVKYVGNMHGNEALGRELMLQLSEFLCEEFRNRNQRIVQLIQDTRIHILPSMNPDGYEVAAAQGPNKPGYLVGRNNANGVDLNRNFPDLNTYIYYNEKYGGPNHHLPLPDNWKSQVEPETRAVIRWMHSFNFVLSANLHGGAVVANYPYDKSFEHRVRGVRRTASTPTPDDKLFQKLAKVYSYAHGWMFQGWNCGDYFPDGITNGASWYSLSKGMQDFNYLHTNCFEITLELSCDKFPPEEELQREWLGNKEALIQFLEQVHQGIKGMVLDQNYNNLANAVISVSGINHDVTSGDHGDYFRLLLPGIYTVSATAPGYDPETVTVTVGPAEPTLVNFHLKRGGSSGGSSGGSSGGSSGGSSGGSSGGSSGGSCPMGCDCFVQEVFCSDEELATVPLDIPPYTKNIIFVETSFTTLETRAFGSNPNLTKVVFLNTQLCQFRPDAFGGLPRLEDLEVTGSSFLNLSTNIFSNLTSLGKLTLNFNMLEALPEGLFQHLAALESLHLQGNQLQALPRRLFQPLTHLKTLNLAQNLLAQLPEELFHPLTSLQTLKLSNNALSGLPQGVFGKLGSLQELFLDSNNISELPPQVFSQLFCLERLWLQRNAITHLPLSIFASLGNLTFLSLQWNMLRVLPAGLFAHTPCLVGLSLTHNQLETVAEGTFAHLSNLRSLMLSYNAITHLPAGIFRDLEELVKLYLGSNNLTALHPALFQNLSKLELLSLSKNQLTTLPEGIFDTNYNLFNLALSHNPLDCTSSNIHFITWYKENLHKLEDSEETTCANPPSLRGVKL

SEQ ID NO: 115 - protein, 854 aa, Artificial Sequence
  hCPN1 variant
VTFRHHRYDDLVRTLYKVQNECPGITRVYSIGRSVEGRHLYVLEFSDHPGIHEPLEPEVKYVGNMHGNEALGRELMLQLSEFLCEEFRNRNQRIVQLIQDTRIHILPSMNPDGYEVAAAQGPNKPGYLVGRNNANGVDLNRNFPDLNTYIYYNEKYGGPNHHLPLPDNWKSQVEPETRAVIRWMHSFNFVLSANLHGGAVVANYPYDKSFEHRVRGVRRTASTPTPDDKLFQKLAKVYSYAHGWMFQGWNCGDYFPDGITNGASWYSLSKGMQDFNYLHTNCFEITLELSCDKFPPEEELQREWLGNKEALIQFLEQVHQGIKGMVLDQNYNNLANAVISVSGINHDVTSGDHGDYFRLLLPGIYTVSATAPGYDPETVTVTVGPAEPTLVNFHLKRGGSSGGSSGGSSGGSSGGSSGGSSGGSSGGSCPMGCDCFVQEVFCSDEELATVPLDIPPYTKNIIFVETSFTTLETRAFGSNPNLTKVVFLNTQLCQFRPDAFGGLPRLEDLEVTGSSFLNLSTNIFSNLTSLGKLTLNFNMLEALPEGLFQHLAALESLHLQGNQLQALPRRLFQPLTHLKTLNLAQNLLAQLPEELFHPLTSLQTLKLSNNALSGLPQGVFGKLGSLQELFLDSNNISELPPQVFSQLFCLERLWLQRNAITHLPLSIFASLGNLTFLSLQWNMLRVLPAGLFAHTPCLVGLSLTHNQLETVAEGTFAHLSNLRSLMLSYNAITHLPAGIFRDLEELVKLYLGSNNLTALHPALFQNLSKLELLSLSKNQLTTLPEGIFDTNYNLFELHISSDSFLCDCQLKLWLPPWLIGRMLQAFVTATCAHPESLKGQSIFSVPPESFVCDD

SEQ ID NO: 116 - protein, 851 aa, Artificial Sequence
  hCPN1 variant
VTFRHHRYDDLVRTLYKVQNECPGITRVYSIGRSVEGRHLYVLEFSDHPGIHEPLEPEVKYVGNMHGNEALGRELMLQLSEFLCEEFRNRNQRIVQLIQDTRIHILPSMNPDGYEVAAAQGPNKPGYLVGRNNANGVDLNRNFPDLNTYIYYNEKYGGPNHHLPLPDNWKSQVEPETRAVIRWMHSFNFVLSANLHGGAVVANYPYDKSFEHRVRGVRRTASTPTPDDKLFQKLAKVYSYAHGWMFQGWNCGDYFPDGITNGASWYSLSKGMQDFNYLHTNCFEITLELSCDKFPPEEELQREWLGNKEALIQFLEQVHQGIKGMVLDQNYNNLANAVISVSGINHDVTSGDHGDYFRLLLPGIYTVSATAPGYDPETVTVTVGPAEPTLVNFHLKGGSSGGSSGGSSGGSSGGSSGGSSGGSSGGSCPMGCDCFVQEVFCSDEELATVPLDIPPYTKNIIFVETSFTTLETRAFGSNPNLTKVVFLNTQLCQFRPDAFGGLPRLEDLEVTGSSFLNLSTNIFSNLTSLGKLTLNFNMLEALPEGLFQHLAALESLHLQGNQLQALPRRLFQPLTHLKTLNLAQNLLAQLPEELFHPLTSLQTLKLSNNALSGLPQGVFGKLGSLQELFLDSNNISELPPQVFSQLFCLERLWLQRNAITHLPLSIFASLGNLTFLSLQWNMLRVLPAGLFAHTPCLVGLSLTHNQLETVAEGTFAHLSNLRSLMLSYNAITHLPAGIFRDLEELVKLYLGSNNLTALHPALFQNLSKLELLSLSKNQLTTLPEGIFDTNYNLFNLALHGNPWQCDCHLAYLFNWLQQYTDRLLNIQTYCAGPAYLKGQVVPALNEKQLVC

SEQ ID NO: 117 - protein, 896 aa, Artificial Sequence
  hCPN1 variant
VTFRHHRYDDLVRTLYKVQNECPGITRVYSIGRSVEGRHLYVLEFSDHPGIHEPLEPEVKYVGNMHGNEALGRELMLQLSEFLCEEFRNRNQRIVQLIQDTRIHILPSMNPDGYEVAAAQGPNKPGYLVGRNNANGVDLNRNFPDLNTYIYYNEKYGGPNHHLPLPDNWKSQVEPETRAVIRWMHSFNFVLSANLHGGAVVANYPYDKSFEHRVRGVRRTASTPTPDDKLFQKLAKVYSYAHGWMFQGWNCGDYFPDGITNGASWYSLSKGMQDFNYLHTNCFEITLELSCDKFPPEEELQREWLGNKEALIQFLEQVHQGIKGMVLDQNYNNLANAVISVSGINHDVTSGDHGDYFRLLLPGIYTVSATAPGYDPETVTVTVGPAEPTLVNFHLKGGSSGGSSGGSSGGSSGGSSGGSSGGSSGGSCPMGCDCFVQEVFCSDEELATVPLDIPPYTKNIIFVETSFTTLETRAFGSNPNLTKVVFLNTQLCQFRPDAFGGLPRLEDLEVTGSSFLNLSTNIFSNLTSLGKLTLNFNMLEALPEGLFQHLAALESLHLQGNQLQALPRRLFQPLTHLKTLNLAQNLLAQLPEELFHPLTSLQTLKLSNNALSGLPQGVFGKLGSLQELFLDSNNISELPPQVFSQLFCLERLWLQRNAITHLPLSIFASLGNLTFLSLQWNMLRVLPAGLFAHTPCLVGLSLTHNQLETVAEGTFAHLSNLRSLMLSYNAITHLPAGIFRDLEELVKLYLGSNNLTALHPALFQNLSKLELLSLSKNQLTTLPEGIFDTNYNLFNLALHGNPWQCDCHLAYLFNWLQQYTDRLLNIQTYCAGPAYLKGQVVPALNEKQLVCLSHNPLDCTSSNIHFITWYKENLHKLEDSEETTCANPPSLRGVKL

SEQ ID NO: 118 - protein, 910 aa, Artificial Sequence
  hCPN1 variant
VTFRHHRYDDLVRTLYKVQNECPGITRVYSIGRSVEGRHLYVLEFSDHPGIHEPLEPEVKYVGNMHGNEALGRELMLQLSEFLCEEFRNRNQRIVQLIQDTRIHILPSMNPDGYEVAAAQGPNKPGYLVGRNNANGVDLNRNFPDLNTYIYYNEKYGGPNHHLPLPDNWKSQVEPETRAVIRWMHSFNFVLSANLHGGAVVANYPYDKSFEHRVRGVRRTASTPTPDDKLFQKLAKVYSYAHGWMFQGWNCGDYFPDGITNGASWYSLSKGMQDFNYLHTNCFEITLELSCDKFPPEEELQREWLGNKEALIQFLEQVHQGIKGMVLDQNYNNLANAVISVSGINHDVTSGDHGDYFRLLLPGIYTVSATAPGYDPETVTVTVGPAEPTLVNFHLKGGSSGGSSGGSSGGSSGGSSGGSSGGSSGGSCPMGCDCFVQEVFCSDEELATVPLDIPPYTKNIIFVETSFTTLETRAFGSNPNLTKVVFLNTQLCQFRPDAFGGLPRLEDLEVTGSSFLNLSTNIFSNLTSLGKLTLNFNMLEALPEGLFQHLAALESLHLQGNQLQALPRRLFQPLTHLKTLNLAQNLLAQLPEELFHPLTSLQTLKLSNNALSGLPQGVFGKLGSLQELFLDSNNISELPPQVFSQLFCLERLWLQRNAITHLPLSIFASLGNLTFLSLQWNMLRVLPAGLFAHTPCLVGLSLTHNQLETVAEGTFAHLSNLRSLMLSYNAITHLPAGIFRDLEELVKLYLGSNNLTALHPALFQNLSKLELLSLSKNQLTTLPEGIFDTNYNLFNLALHGNPWQCDCHLAYLFNWLQQYTDRLLNIQTYCAGPAYLKGQVVPALNEKQLVCELHISSDSFLCDCQLKLWLPPWLIGRMLQAFVTATCAHPESLKGQSIFSVPPESFVCDD

SEQ ID NO: 119 - protein, 847 aa, Artificial Sequence
  hCPN1 variant
VTFRHHRYDDLVRTLYKVQNECPGITRVYSIGRSVEGRHLYVLEFSDHPGIHEPLEPEVKYVGNMHGNEALGRELMLQLSEFLCEEFRNRNQRIVQLIQDTRIHILPSMNPDGYEVAAAQGPNKPGYLVGRNNANGVDLNRNFPDLNTYIYYNEKYGGPNHHLPLPDNWKSQVEPETRAVIRWMHSFNFVLSANLHGGAVVANYPYDKSFEHRVRGVRRTASTPTPDDKLFQKLAKVYSYAHGWMFQGWNCGDYFPDGITNGASWYSLSKGMQDFNYLHTNCFEITLELSCDKFPPEEELQREWLGNKEALIQFLEQVHQGIKGMVLDQNYNNLANAVISVSGINHDVTSGDHGDYFRLLLPGIYTVSATAPGYDPETVTVTVGPAEPTLVNFHLKRGGSSGGSSGGSSGGSSGGSSGGSSGGCPMGCDCFVQEVFCSDEELATVPLDIPPYTKNIIFVETSFTTLETRAFGSNPNLTKVVFLNTQLCQFRPDAFGGLPRLEDLEVTGSSFLNLSTNIFSNLTSLGKLTLNFNMLEALPEGLFQHLAALESLHLQGNQLQALPRRLFQPLTHLKTLNLAQNLLAQLPEELFHPLTSLQTLKLSNNALSGLPQGVFGKLGSLQELFLDSNNISELPPQVFSQLFCLERLWLQRNAITHLPLSIFASLGNLTFLSLQWNMLRVLPAGLFAHTPCLVGLSLTHNQLETVAEGTFAHLSNLRSLMLSYNAITHLPAGIFRDLEELVKLYLGSNNLTALHPALFQNLSKLELLSLSKNQLTTLPEGIFDTNYNLFNLALHGNPWQCDCHLAYLFNWLQQYTDRLLNIQTYCAGPAYLKGQVVPALNEKQLVC

SEQ ID NO: 120 - protein, 861 aa, Artificial Sequence
  hCPN1 variant
VTFRHHRYDDLVRTLYKVQNECPGITRVYSIGRSVEGRHLYVLEFSDHPGIHEPLEPEVKYVGNMHGNEALGRELMLQLSEFLCEEFRNRNQRIVQLIQDTRIHILPSMNPDGYEVAAAQGPNKPGYLVGRNNANGVDLNRNFPDLNTYIYYNEKYGGPNHHLPLPDNWKSQVEPETRAVIRWMHSFNFVLSANLHGGAVVANYPYDKSFEHRVRGVRRTASTPTPDDKLFQKLAKVYSYAHGWMFQGWNCGDYFPDGITNGASWYSLSKGMQDFNYLHTNCFEITLELSCDKFPPEEELQREWLGNKEALIQFLEQVHQGIKGMVLDQNYNNLANAVISVSGINHDVTSGDHGDYFRLLLPGIYTVSATAPGYDPETVTVTVGPAEPTLVNFHLKRGGSSGGSSGGSSGGSSGGSSGGSSGGSSGGSSGGSSSSGGCPMGCDCFVQEVFCSDEELATVPLDIPPYTKNIIFVETSFTTLETRAFGSNPNLTKVVFLNTQLCQFRPDAFGGLPRLEDLEVTGSSFLNLSTNIFSNLTSLGKLTLNFNMLEALPEGLFQHLAALESLHLQGNQLQALPRRLFQPLTHLKTLNLAQNLLAQLPEELFHPLTSLQTLKLSNNALSGLPQGVFGKLGSLQELFLDSNNISELPPQVFSQLFCLERLWLQRNAITHLPLSIFASLGNLTFLSLQWNMLRVLPAGLFAHTPCLVGLSLTHNQLETVAEGTFAHLSNLRSLMLSYNAITHLPAGIFRDLEELVKLYLGSNNLTALHPALFQNLSKLELLSLSKNQLTTLPEGIFDTNYNLFNLALHGNPWQCDCHLAYLFNWLQQYTDRLLNIQTYCAGPAYLKGQVVPALNEKQLVC

SEQ ID NO: 121 - protein, 837 aa, Artificial Sequence
  hCPN1 variant
VTFRHHRYDDLVRTLYKVQNECPGITRVYSIGRSVEGRHLYVLEFSDHPGIHEPLEPEVKYVGNMHGNEALGRELMLQLSEFLCEEFRNRNQRIVQLIQDTRIHILPSMNPDGYEVAAAQGPNKPGYLVGRNNANGVDLNRNFPDLNTYIYYNEKYGGPNHHLPLPDNWKSQVEPETRAVIRWMHSFNFVLSANLHGGAVVANYPYDKSFEHRVRGVRRTASTPTPDDKLFQKLAKVYSYAHGWMFQGWNCGDYFPDGITNGASWYSLSKGMQDFNYLHTNCFEITLELSCDKFPPEEELQREWLGNKEALIQFLEQVHQGIKGMVLDQNYNNLANAVISVSGINHDVTSGDHGDYFRLLLPGIYTVSATAPGYDPETVTVTVGPAEPTLVNFHLKGGSSGGSSGGSSGGSSGGSSGGSSGGCPMGCDCFVQEVFCSDEELATVPLDIPPYTKNIIFVETSFTTLETRAFGSNPNLTKVVFLNTQLCQFRPDAFGGLPRLEDLEVTGSSFLNLSTNIFSNLTSLGKLTLNFNMLEALPEGLFQHLAALESLHLQGNQLQALPRRLFQPLTHLKTLNLAQNLLAQLPEELFHPLTSLQTLKLSNNALSGLPQGVFGKLGSLQELFLDSNNISELPPQVFSQLFCLERLWLQRNAITHLPLSIFASLGNLTFLSLQWNMLRVLPAGLFAHTPCLVGLSLTHNQLETVAEGTFAHLSNLRSLMLSYNAITHLPAGIFRDLEELVKLYLGSNNLTALHPALFQNLSKLELLSLSKNQLTTLPEGIFDTNYNLFNLALSHNPLDCTSSNIHFITWYKENLHKLEDSEETTCANPPSLRGVKL

SEQ ID NO: 122 - protein, 851 aa, Artificial Sequence
  hCPN1 variant
VTFRHHRYDDLVRTLYKVQNECPGITRVYSIGRSVEGRHLYVLEFSDHPGIHEPLEPEVKYVGNMHGNEALGRELMLQLSEFLCEEFRNRNQRIVQLIQDTRIHILPSMNPDGYEVAAAQGPNKPGYLVGRNNANGVDLNRNFPDLNTYIYYNEKYGGPNHHLPLPDNWKSQVEPETRAVIRWMHSFNFVLSANLHGGAVVANYPYDKSFEHRVRGVRRTASTPTPDDKLFQKLAKVYSYAHGWMFQGWNCGDYFPDGITNGASWYSLSKGMQDFNYLHTNCFEITLELSCDKFPPEEELQREWLGNKEALIQFLEQVHQGIKGMVLDQNYNNLANAVISVSGINHDVTSGDHGDYFRLLLPGIYTVSATAPGYDPETVTVTVGPAEPTLVNFHLKGGSSGGSSGGSSGGSSGGSSGGSSGGSSGGSSGGSSSSGGCPMGCDCFVQEVFCSDEELATVPLDIPPYTKNIIFVETSFTTLETRAFGSNPNLTKVVFLNTQLCQFRPDAFGGLPRLEDLEVTGSSFLNLSTNIFSNLTSLGKLTLNFNMLEALPEGLFQHLAALESLHLQGNQLQALPRRLFQPLTHLKTLNLAQNLLAQLPEELFHPLTSLQTLKLSNNALSGLPQGVFGKLGSLQELFLDSNNISELPPQVFSQLFCLERLWLQRNAITHLPLSIFASLGNLTFLSLQWNMLRVLPAGLFAHTPCLVGLSLTHNQLETVAEGTFAHLSNLRSLMLSYNAITHLPAGIFRDLEELVKLYLGSNNLTALHPALFQNLSKLELLSLSKNQLTTLPEGIFDTNYNLFNLALSHNPLDCTSSNIHFITWYKENLHKLEDSEETTCANPPSLRGVKL

SEQ ID NO: 123 - protein, 398 aa, Artificial Sequence
  hCPN1 variant
VTFRHHRYDDLVRTLYKVQNECPGITRVYSIGRSVEGRHLYVLEFSDHPGIHEPLEPEVFYSGNMHGNEALGRELMLQLSEFLCEEFRNRNQRIVQLIQDTRIHILPSMNPDGYEVAAAQGPNKPGYLVGRNNANGVDLNRNFPDLNTYIYYNEKYGGPNHHLPLPDNWKSQVEPETRAYIRWMHSFNFVLAANLHGGAVVANYPYDKSFEHRVRGVRRTASTPTPDDKLFQKLAKVYSYAHGWMFQGWNCGDYFPDGITNGASWYSLSKGMQDFTYLHTNCFIITLELSCDKFPPEEELQREWLGNKEALIQFLEQVHQGIKGMVLDQNYNNLANAVISVSGINHDVTSGDHGDYFRLLLPGIYTVSATAPGYDPETVTVTVGPAEPTLVNFHLKRS

SEQ ID NO: 124 - protein, 398 aa, Artificial Sequence
  hCPN1 variant
VTFRHHRYDDLVRTLYKVQNECPGITRVYSIGRSVEGRHLYVLEFSDHPGIHEPLEPEVFYVGNMHGNEALGRELMLQLSEFLCEEFRNRNQRIVQLIQDTRIHILPSMNPDGYEVAAAQGPNKPGYLVGRNNANGVDLNRNFPDLNTYIYYNEKYGGPNHHLPLPDNWKSQVEPETRAFIRWMHSFNFVLAANLHGGAVVANYPYDKSFEHRVRGVRRTASTPTPDDKLFQKLAKVYSYAHGWMFQGWNCGDYFPDGITNGASWYSLSKGMQDFVYLHTNCFIITLELSCDKFPPEEELQREWLGNKEALIQFLEQVHQGIKGMVLDQNYNNLANAVISVSGINHDVTSGDHGDYFRLLLPGIYTVSATAPGYDPETVTVTVGPAEPTLVNFHLKRS

SEQ ID NO: 125 - protein, 398 aa, Artificial Sequence
  hCPN1 variant
VTFRHHRYDDLVRTLYKVQNECPGITRVYSIGRSVEGRHLYVLEFSDHPGIHEPLEPEVFYMGNMHGNEALGRELMLQLSEFLCEEFRNRNQRIVQLIQDTRIHILPSMNPDGYEVAAAQGPNKPGYLVGRNNANGVDLNRNFPDLNTYIYYNEKYGGPNHHLPLPDNWKSQVEPETRAAIRWMHSFNFVLAANLHGGAVVANYPYDKSFEHRVRGVRRTASTPTPDDKLFQKLAKVYSYAHGWMFQGWNCGDYFPDGITNGASWYSLSKGFQDFVYLHTNCFIITLELSCDKFPPEEELQREWLGNKEALIQFLEQVHQGIKGMVLDQNYNNLANAVISVSGINHDVTSGDHGDYFRLLLPGIYTVSATAPGYDPETVTVTVGPAEPTLVNFHLKRS

SEQ ID NO: 126 - protein, 398 aa, Artificial Sequence
  hCPN1 variant
VTFRHHRYDDLVRTLYKVQNECPGITRVYSIGRSVEGRHLYVLEFSDHPGIHEPLEPEVAYLGNMHGNEALGRELMLQLSEFLCEEFRNRNQRIVQLIQDTRIHILPSMNPDGYEVAAAQGPNKPGYLVGRNNANGVDLNRNFPDLNTYIYYNEKYGGPNHHLPLPDNWKSQVEPETRAVIRWLHSFNFVLMANLHGGAVVANYPYDKSFEHRVRGVRRTASTPTPDDKLFQKLAKVYSYAHGWMFQGWNCGDYFPDGITNGASWYSLSKGLQDFIYLHTNCFVITLELSCDKFPPEEELQREWLGNKEALIQFLEQVHQGIKGMVLDQNYNNLANAVISVSGINHDVTSGDHGDYFRLLLPGIYTVSATAPGYDPETVTVTVGPAEPTLVNFHLKRS

SEQ ID NO: 127 - protein, 398 aa, Artificial Sequence
  hCPN1 variant
VTFRHHRYDDLVRTLYKVQNECPGITRVYSIGRSVEGRHLYVLEFSDHPGIHEPLEPEVKYVGNMHGNEALGRELMLQLSEFLCEEFRNRNQRIVQLIQDTRIHILPSMNPDGYEVAAAQGPNKPGYLVGRNNANGVDLNRNFPDLNTYIYYNEKYGGPNHHLPLPDNWKSQVEPETRAVIRWMHSFNFVLSWNLHGGAVVVNYPYDKSFEHRVRGVRRTASTPTPDDKLFQKLAKVFSYAHGWMFQGWNCGDYFPDGITNGASWYSLSKGMQDFNYLHTNCFELTIEYSCDKFPPEEELQREWLGNKEALIQALEQVHQGIKGMVLDQNYNNLANAVISVSGINHDVTSGDHGDYFRLLLPGIYTVSATAPGYDPETVTVTVGPAEPTLVNFHLKRS

SEQ ID NO: 128 - protein, 398 aa, Artificial Sequence
  hCPN1 variant
VTFRHHRYDDLVRTLYKVQNECPGITRVYSIGRSVEGRHLYVLEFSDHPGIHEPLEPEVKYVGNMHGNEALGRELMLQLSEFLCEEFRNRNQRIVQLIQDTRIHILPSMNPDGYEVAAAQGPNKPGYLVGRNNANGVDLNRNFPDLNTYIYYNEKYGGPNHHLPLPDNWKSQVEPETRAVIRWMHSFNFVLSANLHGGAVVVNYPYDKSFEHRVRGVRRTASTPTPDDKLFQKLAKVYSYAHGWMFQGWNCGDYFPDGITNGASWYSLSKGMQDFNYLHTNCFEITIETSCDKFPPEEELQREWLGNKEALIQFLEQVHQGIKGMVLDQNYNNLANAVISVSGINHDVTSGDHGDYFRLLLPGIYTVSATAPGYDPETVTVTVGPAEPTLVNFHLKRS

SEQ ID NO: 129 - protein, 398 aa, Artificial Sequence
  hCPN1 variant
VTFRHHRYDDLVRTLYKVQNECPGITRVYSIGRSVEGRHLYVLEFSDHPGIHEPLEPEVKYVGNMHGNEALGRELMLQLSEFLCEEFRNRNQRIVQLIQDTRIHILPSMNPDGYEVAAAQGPNKPGYLVGRNNANGVDLNRNFPDLNTYIYYNEKYGGPNHHLPLPDNWKSQVEPETRAVIRWMHSFNFVLSANLHGGAVVINYPYDKSFEHRVRGVRRTASTPTPDDKLFQKLAKVYSYAHGWMFQGWNCGDYFPDGITNGASWYSLSKGMQDFNYLHTNCFEITLELSCDKFPPEEELQREWLGNKEALIQFLEQVHQGIKGMVLDQNYNNLANAVISVSGINHDVTSGDHGDYFRLLLPGIYTVSATAPGYDPETVTVTVGPAEPTLVNFHLKRS

SEQ ID NO: 130 - protein, 398 aa, Artificial Sequence
  hCPN1 variant
VTFRHHRYDDLVRTLYKVQNECPGITRVYSIGRSVEGRHLYVLEFSDHPGIHEPLEPEVKYVGNMHGNEALGRELMLQLSEFLCEEFRNRNQRIVQLIQDTRIHILPSMNPDGYEVAAAQGPNKPGYLVGRNNANGVDLNRNFPDLNTYIYYNEKYGGPNHHLPLPDNWKSQVEPETRAVIRWMHSFNFVLSANLHGGAVVANYPYDKSFEHRVRGVRRTASTPTPDDKLFQKLLKVYSYAHGWMFQGWNCGDYFPDGITNGASWYSLSKGMQDFNYLHTNCFEITLELSCDKFPPEEELQREWLGNKEALIQFLEQVHQGIKGMVLDQNYNNLANAVISVSGINHDVTSGDHGDYFRLLLPGIYTVSATAPGYDPETVTVTVGPAEPTLVNFHLKRS

SEQ ID NO: 131 - protein, 398 aa, Artificial Sequence
  hCPN1 variant
ITWRHHRYDDLVRTLYKVQNECPGITRVYSIGRSVEGRHLYVLEFSDHPGIHEPLEPEVKYVGNMHGNEALGRLLMLWLSEFLCEEFRNRNQRIVQLIQDTRIHILPSMNPDGYEVAAAQGPNKPGYLVGRNNANGVDLNRNFPDLNTYIYYNEKYGGPNHHLPLPDNWKSQVEPETRAVIRWMHSFNFVLSANLHGGAVVANYPYDKSFEHRVRGVRRTASTPTPDDKLFQKLAKVYSYAHGWMFQGWNCGDYFPDGITNGASWYSLSKGMQDFNYLHTNCFEITLELSCDKFPPEEELQREWLGNKEALIQFLEQVHQGIKGMVLDQNYNNLANAVISVSGINHDVTSGDHGDYFRLLLPGIYTVSATAPGYDPETVTVTVGPAEPTLVNFHLKRS

SEQ ID NO: 132 - protein, 398 aa, Artificial Sequence
  hCPN1 variant
ITFRHHRYDDLVRTLYKVQNECPGITRVYSIGRSVEGRHLYVLEFSDHPGIHEPLEPEVKYVGNMHGNEALGRLLMLWLSEFLCEEFRNRNQRIVQLIQDTRIHILPSMNPDGYEVAAAQGPNKPGYLVGRNNANGVDLNRNFPDLNTYIYYNEKYGGPNHHLPLPDNWKSQVEPETRAVIRWMHSFNFVLSANLHGGAVVANYPYDKSFEHRVRGVRRTASTPTPDDKLFQKLAKVYSYAHGWMFQGWNCGDYFPDGITNGASWYSLSKGMQDFNYLHTNCFEITLELSCDKFPPEEELQREWLGNKEALIQFLEQVHQGIKGMVLDQNYNNLANAVISVSGINHDVTSGDHGDYFRLLLPGIYTVSATAPGYDPETVTVTVGPAEPTLVNFHLKRS

SEQ ID NO: 133 - protein, 995 aa, Artificial Sequence
  hCPN1 variant
VTFRHHRYDDLVRTLYKVQNECPGITRVYSIGRSVEGRHLYVLEFSDHPGIHEPLEPEVFYSGNMHGNEALGRELMLQLSEFLCEEFRNRNQRIVQLIQDTRIHILPSMNPDGYEVAAAQGPNKPGYLVGRNNANGVDLNRNFPDLNTYIYYNEKYGGPNHHLPLPDNWKSQVEPETRAYIRWMHSFNFVLAANLHGGAVVANYPYDKSFEHRVRGVRRTASTPTPDDKLFQKLAKVYSYAHGWMFQGWNCGDYFPDGITNGASWYSLSKGMQDFTYLHTNCFIITLELSCDKFPPEEELQREWLGNKEALIQFLEQVHQGIKGMVLDQNYNNLANAVISVSGINHDVTSGDHGDYFRLLLPGIYTVSATAPGYDPETVTVTVGPAEPTLVNFHLKRSGSSGGSSGGSSGDAHKSEVAHRFKDLGEENFKALVLIAFAQYLQQCPFEDHVKLVNEVTEFAKTCVADESAENCDKSLHTLFGDKLCTVATLRETYGEMADCCAKQEPERNECFLQHKDDNPNLPRLVRPEVDVMCTAFHDNEETFLKKYLYEIARRHPYFYAPELLFFAKRYKAAFTECCQAADKAACLLPKLDELRDEGKASSAKQRLKCASLQKFGERAFKAWAVARLSQRFPKAEFAEVSKLVTDLTKVHTECCHGDLLECADDRADLAKYICENQDSISSKLKECCEKPLLEKSHCIAEVENDEMPADLPSLAADFVESKDVCKNYAEAKDVFLGMFLYEYARRHPDYSVVLLLRLAKTYETTLEKCCAAADPHECYAKVFDEFKPLVEEPQNLIKQNCELFEQLGEYKFQNALLVRYTKKVPQVSTPTLVEVSRNLGKVGSKCCKHPEAKRMPCAEDYLSVVLNQLCVLHEKTPVSDRVTKCCTESLVNRRPCFSALEVDETYVPKEFNAETFTFHADICTLSEKERQIKKQTALVELVKHKPKATKEQLKAVMDDFAAFVEKCCKADDKETCFAEEGKKLVAASQAALGL

SEQ ID NO: 134 - protein, 995 aa, Artificial Sequence
  hCPN1 variant
VTFRHHRYDDLVRTLYKVQNECPGITRVYSIGRSVEGRHLYVLEFSDHPGIHEPLEPEVFYVGNMHGNEALGRELMLQLSEFLCEEFRNRNQRIVQLIQDTRIHILPSMNPDGYEVAAAQGPNKPGYLVGRNNANGVDLNRNFPDLNTYIYYNEKYGGPNHHLPLPDNWKSQVEPETRAFIRWMHSFNFVLAANLHGGAVVANYPYDKSFEHRVRGVRRTASTPTPDDKLFQKLAKVYSYAHGWMFQGWNCGDYFPDGITNGASWYSLSKGMQDFVYLHTNCFIITLELSCDKFPPEEELQREWLGNKEALIQFLEQVHQGIKGMVLDQNYNNLANAVISVSGINHDVTSGDHGDYFRLLLPGIYTVSATAPGYDPETVTVTVGPAEPTLVNFHLKRSGSSGGSSGGSSGDAHKSEVAHRFKDLGEENFKALVLIAFAQYLQQCPFEDHVKLVNEVTEFAKTCVADESAENCDKSLHTLFGDKLCTVATLRETYGEMADCCAKQEPERNECFLQHKDDNPNLPRLVRPEVDVMCTAFHDNEETFLKKYLYEIARRHPYFYAPELLFFAKRYKAAFTECCQAADKAACLLPKLDELRDEGKASSAKQRLKCASLQKFGERAFKAWAVARLSQRFPKAEFAEVSKLVTDLTKVHTECCHGDLLECADDRADLAKYICENQDSISSKLKECCEKPLLEKSHCIAEVENDEMPADLPSLAADFVESKDVCKNYAEAKDVFLGMFLYEYARRHPDYSVVLLLRLAKTYETTLEKCCAAADPHECYAKVFDEFKPLVEEPQNLIKQNCELFEQLGEYKFQNALLVRYTKKVPQVSTPTLVEVSRNLGKVGSKCCKHPEAKRMPCAEDYLSVVLNQLCVLHEKTPVSDRVTKCCTESLVNRRPCFSALEVDETYVPKEFNAETFTFHADICTLSEKERQIKKQTALVELVKHKPKATKEQLKAVMDDFAAFVEKCCKADDKETCFAEEGKKLVAASQAALGL

SEQ ID NO: 135 - protein, 995 aa, Artificial Sequence
  hCPN1 variant
VTFRHHRYDDLVRTLYKVQNECPGITRVYSIGRSVEGRHLYVLEFSDHPGIHEPLEPEVFYMGNMHGNEALGRELMLQLSEFLCEEFRNRNQRIVQLIQDTRIHILPSMNPDGYEVAAAQGPNKPGYLVGRNNANGVDLNRNFPDLNTYIYYNEKYGGPNHHLPLPDNWKSQVEPETRAAIRWMHSFNFVLAANLHGGAVVANYPYDKSFEHRVRGVRRTASTPTPDDKLFQKLAKVYSYAHGWMFQGWNCGDYFPDGITNGASWYSLSKGFQDFVYLHTNCFIITLELSCDKFPPEEELQREWLGNKEALIQFLEQVHQGIKGMVLDQNYNNLANAVISVSGINHDVTSGDHGDYFRLLLPGIYTVSATAPGYDPETVTVTVGPAEPTLVNFHLKRSGSSGGSSGGSSGDAHKSEVAHRFKDLGEENFKALVLIAFAQYLQQCPFEDHVKLVNEVTEFAKTCVADESAENCDKSLHTLFGDKLCTVATLRETYGEMADCCAKQEPERNECFLQHKDDNPNLPRLVRPEVDVMCTAFHDNEETFLKKYLYEIARRHPYFYAPELLFFAKRYKAAFTECCQAADKAACLLPKLDELRDEGKASSAKQRLKCASLQKFGERAFKAWAVARLSQRFPKAEFAEVSKLVTDLTKVHTECCHGDLLECADDRADLAKYICENQDSISSKLKECCEKPLLEKSHCIAEVENDEMPADLPSLAADFVESKDVCKNYAEAKDVFLGMFLYEYARRHPDYSVVLLLRLAKTYETTLEKCCAAADPHECYAKVFDEFKPLVEEPQNLIKQNCELFEQLGEYKFQNALLVRYTKKVPQVSTPTLVEVSRNLGKVGSKCCKHPEAKRMPCAEDYLSVVLNQLCVLHEKTPVSDRVTKCCTESLVNRRPCFSALEVDETYVPKEFNAETFTFHADICTLSEKERQIKKQTALVELVKHKPKATKEQLKAVMDDFAAFVEKCCKADDKETCFAEEGKKLVAASQAALGL

SEQ ID NO: 136 - protein, 995 aa, Artificial Sequence
  hCPN1 variant
VTFRHHRYDDLVRTLYKVQNECPGITRVYSIGRSVEGRHLYVLEFSDHPGIHEPLEPEVAYLGNMHGNEALGRELMLQLSEFLCEEFRNRNQRIVQLIQDTRIHILPSMNPDGYEVAAAQGPNKPGYLVGRNNANGVDLNRNFPDLNTYIYYNEKYGGPNHHLPLPDNWKSQVEPETRAVIRWLHSFNFVLMANLHGGAVVANYPYDKSFEHRVRGVRRTASTPTPDDKLFQKLAKVYSYAHGWMFQGWNCGDYFPDGITNGASWYSLSKGLQDFIYLHTNCFVITLELSCDKFPPEEELQREWLGNKEALIQFLEQVHQGIKGMVLDQNYNNLANAVISVSGINHDVTSGDHGDYFRLLLPGIYTVSATAPGYDPETVTVTVGPAEPTLVNFHLKRSGSSGGSSGGSSGDAHKSEVAHRFKDLGEENFKALVLIAFAQYLQQCPFEDHVKLVNEVTEFAKTCVADESAENCDKSLHTLFGDKLCTVATLRETYGEMADCCAKQEPERNECFLQHKDDNPNLPRLVRPEVDVMCTAFHDNEETFLKKYLYEIARRHPYFYAPELLFFAKRYKAAFTECCQAADKAACLLPKLDELRDEGKASSAKQRLKCASLQKFGERAFKAWAVARLSQRFPKAEFAEVSKLVTDLTKVHTECCHGDLLECADDRADLAKYICENQDSISSKLKECCEKPLLEKSHCIAEVENDEMPADLPSLAADFVESKDVCKNYAEAKDVFLGMFLYEYARRHPDYSVVLLLRLAKTYETTLEKCCAAADPHECYAKVFDEFKPLVEEPQNLIKQNCELFEQLGEYKFQNALLVRYTKKVPQVSTPTLVEVSRNLGKVGSKCCKHPEAKRMPCAEDYLSVVLNQLCVLHEKTPVSDRVTKCCTESLVNRRPCFSALEVDETYVPKEFNAETFTFHADICTLSEKERQIKKQTALVELVKHKPKATKEQLKAVMDDFAAFVEKCCKADDKETCFAEEGKKLVAASQAALGL

SEQ ID NO: 137 - protein, 995 aa, Artificial Sequence
  hCPN1 variant
VTFRHHRYDDLVRTLYKVQNECPGITRVYSIGRSVEGRHLYVLEFSDHPGIHEPLEPEVKYVGNMHGNEALGRELMLQLSEFLCEEFRNRNQRIVQLIQDTRIHILPSMNPDGYEVAAAQGPNKPGYLVGRNNANGVDLNRNFPDLNTYIYYNEKYGGPNHHLPLPDNWKSQVEPETRAVIRWMHSFNFVLSWNLHGGAVVVNYPYDKSFEHRVRGVRRTASTPTPDDKLFQKLAKVFSYAHGWMFQGWNCGDYFPDGITNGASWYSLSKGMQDFNYLHTNCFELTIEYSCDKFPPEEELQREWLGNKEALIQALEQVHQGIKGMVLDQNYNNLANAVISVSGINHDVTSGDHGDYFRLLLPGIYTVSATAPGYDPETVTVTVGPAEPTLVNFHLKRSGSSGGSSGGSSGDAHKSEVAHRFKDLGEENFKALVLIAFAQYLQQCPFEDHVKLVNEVTEFAKTCVADESAENCDKSLHTLFGDKLCTVATLRETYGEMADCCAKQEPERNECFLQHKDDNPNLPRLVRPEVDVMCTAFHDNEETFLKKYLYEIARRHPYFYAPELLFFAKRYKAAFTECCQAADKAACLLPKLDELRDEGKASSAKQRLKCASLQKFGERAFKAWAVARLSQRFPKAEFAEVSKLVTDLTKVHTECCHGDLLECADDRADLAKYICENQDSISSKLKECCEKPLLEKSHCIAEVENDEMPADLPSLAADFVESKDVCKNYAEAKDVFLGMFLYEYARRHPDYSVVLLLRLAKTYETTLEKCCAAADPHECYAKVFDEFKPLVEEPQNLIKQNCELFEQLGEYKFQNALLVRYTKKVPQVSTPTLVEVSRNLGKVGSKCCKHPEAKRMPCAEDYLSVVLNQLCVLHEKTPVSDRVTKCCTESLVNRRPCFSALEVDETYVPKEFNAETFTFHADICTLSEKERQIKKQTALVELVKHKPKATKEQLKAVMDDFAAFVEKCCKADDKETCFAEEGKKLVAASQAALGL

SEQ ID NO: 138 - protein, 995 aa, Artificial Sequence
  hCPN1 variant
VTFRHHRYDDLVRTLYKVQNECPGITRVYSIGRSVEGRHLYVLEFSDHPGIHEPLEPEVKYVGNMHGNEALGRELMLQLSEFLCEEFRNRNQRIVQLIQDTRIHILPSMNPDGYEVAAAQGPNKPGYLVGRNNANGVDLNRNFPDLNTYIYYNEKYGGPNHHLPLPDNWKSQVEPETRAVIRWMHSFNFVLSANLHGGAVVVNYPYDKSFEHRVRGVRRTASTPTPDDKLFQKLAKVYSYAHGWMFQGWNCGDYFPDGITNGASWYSLSKGMQDFNYLHTNCFEITIETSCDKFPPEEELQREWLGNKEALIQFLEQVHQGIKGMVLDQNYNNLANAVISVSGINHDVTSGDHGDYFRLLLPGIYTVSATAPGYDPETVTVTVGPAEPTLVNFHLKRSGSSGGSSGGSSGDAHKSEVAHRFKDLGEENFKALVLIAFAQYLQQCPFEDHVKLVNEVTEFAKTCVADESAENCDKSLHTLFGDKLCTVATLRETYGEMADCCAKQEPERNECFLQHKDDNPNLPRLVRPEVDVMCTAFHDNEETFLKKYLYEIARRHPYFYAPELLFFAKRYKAAFTECCQAADKAACLLPKLDELRDEGKASSAKQRLKCASLQKFGERAFKAWAVARLSQRFPKAEFAEVSKLVTDLTKVHTECCHGDLLECADDRADLAKYICENQDSISSKLKECCEKPLLEKSHCIAEVENDEMPADLPSLAADFVESKDVCKNYAEAKDVFLGMFLYEYARRHPDYSVVLLLRLAKTYETTLEKCCAAADPHECYAKVFDEFKPLVEEPQNLIKQNCELFEQLGEYKFQNALLVRYTKKVPQVSTPTLVEVSRNLGKVGSKCCKHPEAKRMPCAEDYLSVVLNQLCVLHEKTPVSDRVTKCCTESLVNRRPCFSALEVDETYVPKEFNAETFTFHADICTLSEKERQIKKQTALVELVKHKPKATKEQLKAVMDDFAAFVEKCCKADDKETCFAEEGKKLVAASQAALGL

SEQ ID NO: 139 - protein, 995 aa, Artificial Sequence
  hCPN1 variant
VTFRHHRYDDLVRTLYKVQNECPGITRVYSIGRSVEGRHLYVLEFSDHPGIHEPLEPEVKYVGNMHGNEALGRELMLQLSEFLCEEFRNRNQRIVQLIQDTRIHILPSMNPDGYEVAAAQGPNKPGYLVGRNNANGVDLNRNFPDLNTYIYYNEKYGGPNHHLPLPDNWKSQVEPETRAVIRWMHSFNFVLSANLHGGAVVINYPYDKSFEHRVRGVRRTASTPTPDDKLFQKLAKVYSYAHGWMFQGWNCGDYFPDGITNGASWYSLSKGMQDFNYLHTNCFEITLELSCDKFPPEEELQREWLGNKEALIQFLEQVHQGIKGMVLDQNYNNLANAVISVSGINHDVTSGDHGDYFRLLLPGIYTVSATAPGYDPETVTVTVGPAEPTLVNFHLKRSGSSGGSSGGSSGDAHKSEVAHRFKDLGEENFKALVLIAFAQYLQQCPFEDHVKLVNEVTEFAKTCVADESAENCDKSLHTLFGDKLCTVATLRETYGEMADCCAKQEPERNECFLQHKDDNPNLPRLVRPEVDVMCTAFHDNEETFLKKYLYEIARRHPYFYAPELLFFAKRYKAAFTECCQAADKAACLLPKLDELRDEGKASSAKQRLKCASLQKFGERAFKAWAVARLSQRFPKAEFAEVSKLVTDLTKVHTECCHGDLLECADDRADLAKYICENQDSISSKLKECCEKPLLEKSHCIAEVENDEMPADLPSLAADFVESKDVCKNYAEAKDVFLGMFLYEYARRHPDYSVVLLLRLAKTYETTLEKCCAAADPHECYAKVFDEFKPLVEEPQNLIKQNCELFEQLGEYKFQNALLVRYTKKVPQVSTPTLVEVSRNLGKVGSKCCKHPEAKRMPCAEDYLSVVLNQLCVLHEKTPVSDRVTKCCTESLVNRRPCFSALEVDETYVPKEFNAETFTFHADICTLSEKERQIKKQTALVELVKHKPKATKEQLKAVMDDFAAFVEKCCKADDKETCFAEEGKKLVAASQAALGL

SEQ ID NO: 140 - protein, 995 aa, Artificial Sequence
  hCPN1 variant
VTFRHHRYDDLVRTLYKVQNECPGITRVYSIGRSVEGRHLYVLEFSDHPGIHEPLEPEVKYVGNMHGNEALGRELMLQLSEFLCEEFRNRNQRIVQLIQDTRIHILPSMNPDGYEVAAAQGPNKPGYLVGRNNANGVDLNRNFPDLNTYIYYNEKYGGPNHHLPLPDNWKSQVEPETRAVIRWMHSFNFVLSANLHGGAVVANYPYDKSFEHRVRGVRRTASTPTPDDKLFQKLLKVYSYAHGWMFQGWNCGDYFPDGITNGASWYSLSKGMQDFNYLHTNCFEITLELSCDKFPPEEELQREWLGNKEALIQFLEQVHQGIKGMVLDQNYNNLANAVISVSGINHDVTSGDHGDYFRLLLPGIYTVSATAPGYDPETVTVTVGPAEPTLVNFHLKRSGSSGGSSGGSSGDAHKSEVAHRFKDLGEENFKALVLIAFAQYLQQCPFEDHVKLVNEVTEFAKTCVADESAENCDKSLHTLFGDKLCTVATLRETYGEMADCCAKQEPERNECFLQHKDDNPNLPRLVRPEVDVMCTAFHDNEETFLKKYLYEIARRHPYFYAPELLFFAKRYKAAFTECCQAADKAACLLPKLDELRDEGKASSAKQRLKCASLQKFGERAFKAWAVARLSQRFPKAEFAEVSKLVTDLTKVHTECCHGDLLECADDRADLAKYICENQDSISSKLKECCEKPLLEKSHCIAEVENDEMPADLPSLAADFVESKDVCKNYAEAKDVFLGMFLYEYARRHPDYSVVLLLRLAKTYETTLEKCCAAADPHECYAKVFDEFKPLVEEPQNLIKQNCELFEQLGEYKFQNALLVRYTKKVPQVSTPTLVEVSRNLGKVGSKCCKHPEAKRMPCAEDYLSVVLNQLCVLHEKTPVSDRVTKCCTESLVNRRPCFSALEVDETYVPKEFNAETFTFHADICTLSEKERQIKKQTALVELVKHKPKATKEQLKAVMDDFAAFVEKCCKADDKETCFAEEGKKLVAASQAALGL

SEQ ID NO: 141 - protein, 995 aa, Artificial Sequence
  hCPN1 variant
ITWRHHRYDDLVRTLYKVQNECPGITRVYSIGRSVEGRHLYVLEFSDHPGIHEPLEPEVKYVGNMHGNEALGRLLMLWLSEFLCEEFRNRNQRIVQLIQDTRIHILPSMNPDGYEVAAAQGPNKPGYLVGRNNANGVDLNRNFPDLNTYIYYNEKYGGPNHHLPLPDNWKSQVEPETRAVIRWMHSFNFVLSANLHGGAVVANYPYDKSFEHRVRGVRRTASTPTPDDKLFQKLAKVYSYAHGWMFQGWNCGDYFPDGITNGASWYSLSKGMQDFNYLHTNCFEITLELSCDKFPPEEELQREWLGNKEALIQFLEQVHQGIKGMVLDQNYNNLANAVISVSGINHDVTSGDHGDYFRLLLPGIYTVSATAPGYDPETVTVTVGPAEPTLVNFHLKRSGSSGGSSGGSSGDAHKSEVAHRFKDLGEENFKALVLIAFAQYLQQCPFEDHVKLVNEVTEFAKTCVADESAENCDKSLHTLFGDKLCTVATLRETYGEMADCCAKQEPERNECFLQHKDDNPNLPRLVRPEVDVMCTAFHDNEETFLKKYLYEIARRHPYFYAPELLFFAKRYKAAFTECCQAADKAACLLPKLDELRDEGKASSAKQRLKCASLQKFGERAFKAWAVARLSQRFPKAEFAEVSKLVTDLTKVHTECCHGDLLECADDRADLAKYICENQDSISSKLKECCEKPLLEKSHCIAEVENDEMPADLPSLAADFVESKDVCKNYAEAKDVFLGMFLYEYARRHPDYSVVLLLRLAKTYETTLEKCCAAADPHECYAKVFDEFKPLVEEPQNLIKQNCELFEQLGEYKFQNALLVRYTKKVPQVSTPTLVEVSRNLGKVGSKCCKHPEAKRMPCAEDYLSVVLNQLCVLHEKTPVSDRVTKCCTESLVNRRPCFSALEVDETYVPKEFNAETFTFHADICTLSEKERQIKKQTALVELVKHKPKATKEQLKAVMDDFAAFVEKCCKADDKETCFAEEGKKLVAASQAALGL

SEQ ID NO: 142 - protein, 995 aa, Artificial Sequence
  hCPN1 variant
ITFRHHRYDDLVRTLYKVQNECPGITRVYSIGRSVEGRHLYVLEFSDHPGIHEPLEPEVKYVGNMHGNEALGRLLMLWLSEFLCEEFRNRNQRIVQLIQDTRIHILPSMNPDGYEVAAAQGPNKPGYLVGRNNANGVDLNRNFPDLNTYIYYNEKYGGPNHHLPLPDNWKSQVEPETRAVIRWMHSFNFVLSANLHGGAVVANYPYDKSFEHRVRGVRRTASTPTPDDKLFQKLAKVYSYAHGWMFQGWNCGDYFPDGITNGASWYSLSKGMQDFNYLHTNCFEITLELSCDKFPPEEELQREWLGNKEALIQFLEQVHQGIKGMVLDQNYNNLANAVISVSGINHDVTSGDHGDYFRLLLPGIYTVSATAPGYDPETVTVTVGPAEPTLVNFHLKRSGSSGGSSGGSSGDAHKSEVAHRFKDLGEENFKALVLIAFAQYLQQCPFEDHVKLVNEVTEFAKTCVADESAENCDKSLHTLFGDKLCTVATLRETYGEMADCCAKQEPERNECFLQHKDDNPNLPRLVRPEVDVMCTAFHDNEETFLKKYLYEIARRHPYFYAPELLFFAKRYKAAFTECCQAADKAACLLPKLDELRDEGKASSAKQRLKCASLQKFGERAFKAWAVARLSQRFPKAEFAEVSKLVTDLTKVHTECCHGDLLECADDRADLAKYICENQDSISSKLKECCEKPLLEKSHCIAEVENDEMPADLPSLAADFVESKDVCKNYAEAKDVFLGMFLYEYARRHPDYSVVLLLRLAKTYETTLEKCCAAADPHECYAKVFDEFKPLVEEPQNLIKQNCELFEQLGEYKFQNALLVRYTKKVPQVSTPTLVEVSRNLGKVGSKCCKHPEAKRMPCAEDYLSVVLNQLCVLHEKTPVSDRVTKCCTESLVNRRPCFSALEVDETYVPKEFNAETFTFHADICTLSEKERQIKKQTALVELVKHKPKATKEQLKAVMDDFAAFVEKCCKADDKETCFAEEGKKLVAASQAALGL

SEQ ID NO: 143 - protein, 963 aa, Artificial Sequence
  hCPN1 variant
GHHHHHHHHHHGSLQDSEVNQEAKPEVKPEVKPETHINLKVSDGSSEIFFKIKKTTPLRRLMEAFAKRQGKEMDSLTFLYDGIEIQADQTPEDLDMEDNDIIEAHREQIGGVTFRHHRYDDLVRTLYKVQNECPGITRVYSIGRSVEGRHLYVLEFSDHPGIHEPLEPEVKYVGNMHGNEALGRELMLQLSEFLCEEFRNRNQRIVQLIQDTRIHILPSMNPDGYEVAAAQGPNKPGYLVGRNNANGVDLNRNFPDLNTYIYYNEKYGGPNHHLPLPDNWKSQVEPETRAVIRWMHSFNFVLSANLHGGAVVANYPYDKSFEHRVRGVRRTASTPTPDDKLFQKLAKVYSYAHGWMFQGWNCGDYFPDGITNGASWYSLSKGMQDFNYLHTNCFEITLELSCDKFPPEEELQREWLGNKEALIQFLEQVHQGIKGMVLDQNYNNLANAVISVSGINHDVTSGDHGDYFRLLLPGIYTVSATAPGYDPETVTVTVGPAEPTLVNFHLKRGGSSGGSSGGSSGGSSGGSSGGSSGGSSGGSCPMGCDCFVQEVFCSDEELATVPLDIPPYTKNIIFVETSFTTLETRAFGSNPNLTKVVFLNTQLCQFRPDAFGGLPRLEDLEVTGSSFLNLSTNIFSNLTSLGKLTLNFNMLEALPEGLFQHLAALESLHLQGNQLQALPRRLFQPLTHLKTLNLAQNLLAQLPEELFHPLTSLQTLKLSNNALSGLPQGVFGKLGSLQELFLDSNNISELPPQVFSQLFCLERLWLQRNAITHLPLSIFASLGNLTFLSLQWNMLRVLPAGLFAHTPCLVGLSLTHNQLETVAEGTFAHLSNLRSLMLSYNAITHLPAGIFRDLEELVKLYLGSNNLTALHPALFQNLSKLELLSLSKNQLTTLPEGIFDTNYNLFNLALHGNPWQCDCHLAYLFNWLQQYTDRLLNIQTYCAGPAYLKGQVVPALNEKQLVC

SEQ ID NO: 144 - protein, 954 aa, Artificial Sequence
  hCPN1 variant
GHHHHHHHHHHGSLQDSEVNQEAKPEVKPEVKPETHINLKVSDGSSEIFFKIKKTTPLRRLMEAFAKRQGKEMDSLTFLYDGIEIQADQTPEDLDMEDNDIIEAHREQIGGVTFRHHRYDDLVRTLYKVQNECPGITRVYSIGRSVEGRHLYVLEFSDHPGIHEPLEPEVKYVGNMHGNEALGRELMLQLSEFLCEEFRNRNQRIVQLIQDTRIHILPSMNPDGYEVAAAQGPNKPGYLVGRNNANGVDLNRNFPDLNTYIYYNEKYGGPNHHLPLPDNWKSQVEPETRAVIRWMHSFNFVLSANLHGGAVVANYPYDKSFEHRVRGVRRTASTPTPDDKLFQKLAKVYSYAHGWMFQGWNCGDYFPDGITNGASWYSLSKGMQDFNYLHTNCFEITLELSCDKFPPEEELQREWLGNKEALIQFLEQVHQGIKGMVLDQNYNNLANAVISVSGINHDVTSGDHGDYFRLLLPGIYTVSATAPGYDPETVTVTVGPAEPTLVNFHLKRGGSSGGSSGGSSGGSSGGSSGGSSGGSSGGSCPMGCDCFVQEVFCSDEELATVPLDIPPYTKNIIFVETSFTTLETRAFGSNPNLTKVVFLNTQLCQFRPDAFGGLPRLEDLEVTGSSFLNLSTNIFSNLTSLGKLTLNFNMLEALPEGLFQHLAALESLHLQGNQLQALPRRLFQPLTHLKTLNLAQNLLAQLPEELFHPLTSLQTLKLSNNALSGLPQGVFGKLGSLQELFLDSNNISELPPQVFSQLFCLERLWLQRNAITHLPLSIFASLGNLTFLSLQWNMLRVLPAGLFAHTPCLVGLSLTHNQLETVAEGTFAHLSNLRSLMLSYNAITHLPAGIFRDLEELVKLYLGSNNLTALHPALFQNLSKLELLSLSKNQLTTLPEGIFDTNYNLFNLALSHNPLDCTSSNIHFITWYKENLHKLEDSEETTCANPPSLRGVKL

SEQ ID NO: 145 - protein, 965 aa, Artificial Sequence
  hCPN1 variant
GHHHHHHHHHHGSLQDSEVNQEAKPEVKPEVKPETHINLKVSDGSSEIFFKIKKTTPLRRLMEAFAKRQGKEMDSLTFLYDGIEIQADQTPEDLDMEDNDIIEAHREQIGGVTFRHHRYDDLVRTLYKVQNECPGITRVYSIGRSVEGRHLYVLEFSDHPGIHEPLEPEVKYVGNMHGNEALGRELMLQLSEFLCEEFRNRNQRIVQLIQDTRIHILPSMNPDGYEVAAAQGPNKPGYLVGRNNANGVDLNRNFPDLNTYIYYNEKYGGPNHHLPLPDNWKSQVEPETRAVIRWMHSFNFVLSANLHGGAVVANYPYDKSFEHRVRGVRRTASTPTPDDKLFQKLAKVYSYAHGWMFQGWNCGDYFPDGITNGASWYSLSKGMQDFNYLHTNCFEITLELSCDKFPPEEELQREWLGNKEALIQFLEQVHQGIKGMVLDQNYNNLANAVISVSGINHDVTSGDHGDYFRLLLPGIYTVSATAPGYDPETVTVTVGPAEPTLVNFHLKRGGSSGGSSGGSSGGSSGGSSGGSSGGSSGGSCPMGCDCFVQEVFCSDEELATVPLDIPPYTKNIIFVETSFTTLETRAFGSNPNLTKVVFLNTQLCQFRPDAFGGLPRLEDLEVTGSSFLNLSTNIFSNLTSLGKLTLNFNMLEALPEGLFQHLAALESLHLQGNQLQALPRRLFQPLTHLKTLNLAQNLLAQLPEELFHPLTSLQTLKLSNNALSGLPQGVFGKLGSLQELFLDSNNISELPPQVFSQLFCLERLWLQRNAITHLPLSIFASLGNLTFLSLQWNMLRVLPAGLFAHTPCLVGLSLTHNQLETVAEGTFAHLSNLRSLMLSYNAITHLPAGIFRDLEELVKLYLGSNNLTALHPALFQNLSKLELLSLSKNQLTTLPEGIFDTNYNLFELHISSDSFLCDCQLKLWLPPWLIGRMLQAFVTATCAHPESLKGQSIFSVPPESFVCDD

SEQ ID NO: 146 - protein, 962 aa, Artificial Sequence
  hCPN1 variant
GHHHHHHHHHHGSLQDSEVNQEAKPEVKPEVKPETHINLKVSDGSSEIFFKIKKTTPLRRLMEAFAKRQGKEMDSLTFLYDGIEIQADQTPEDLDMEDNDIIEAHREQIGGVTFRHHRYDDLVRTLYKVQNECPGITRVYSIGRSVEGRHLYVLEFSDHPGIHEPLEPEVKYVGNMHGNEALGRELMLQLSEFLCEEFRNRNQRIVQLIQDTRIHILPSMNPDGYEVAAAQGPNKPGYLVGRNNANGVDLNRNFPDLNTYIYYNEKYGGPNHHLPLPDNWKSQVEPETRAVIRWMHSFNFVLSANLHGGAVVANYPYDKSFEHRVRGVRRTASTPTPDDKLFQKLAKVYSYAHGWMFQGWNCGDYFPDGITNGASWYSLSKGMQDFNYLHTNCFEITLELSCDKFPPEEELQREWLGNKEALIQFLEQVHQGIKGMVLDQNYNNLANAVISVSGINHDVTSGDHGDYFRLLLPGIYTVSATAPGYDPETVTVTVGPAEPTLVNFHLKGGSSGGSSGGSSGGSSGGSSGGSSGGSSGGSCPMGCDCFVQEVFCSDEELATVPLDIPPYTKNIIFVETSFTTLETRAFGSNPNLTKVVFLNTQLCQFRPDAFGGLPRLEDLEVTGSSFLNLSTNIFSNLTSLGKLTLNFNMLEALPEGLFQHLAALESLHLQGNQLQALPRRLFQPLTHLKTLNLAQNLLAQLPEELFHPLTSLQTLKLSNNALSGLPQGVFGKLGSLQELFLDSNNISELPPQVFSQLFCLERLWLQRNAITHLPLSIFASLGNLTFLSLQWNMLRVLPAGLFAHTPCLVGLSLTHNQLETVAEGTFAHLSNLRSLMLSYNAITHLPAGIFRDLEELVKLYLGSNNLTALHPALFQNLSKLELLSLSKNQLTTLPEGIFDTNYNLFNLALHGNPWQCDCHLAYLFNWLQQYTDRLLNIQTYCAGPAYLKGQVVPALNEKQLVC

SEQ ID NO: 147 - protein, 1007 aa, Artificial Sequence
  hCPN1 variant
GHHHHHHHHHHGSLQDSEVNQEAKPEVKPEVKPETHINLKVSDGSSEIFFKIKKTTPLRRLMEAFAKRQGKEMDSLTFLYDGIEIQADQTPEDLDMEDNDIIEAHREQIGGVTFRHHRYDDLVRTLYKVQNECPGITRVYSIGRSVEGRHLYVLEFSDHPGIHEPLEPEVKYVGNMHGNEALGRELMLQLSEFLCEEFRNRNQRIVQLIQDTRIHILPSMNPDGYEVAAAQGPNKPGYLVGRNNANGVDLNRNFPDLNTYIYYNEKYGGPNHHLPLPDNWKSQVEPETRAVIRWMHSFNFVLSANLHGGAVVANYPYDKSFEHRVRGVRRTASTPTPDDKLFQKLAKVYSYAHGWMFQGWNCGDYFPDGITNGASWYSLSKGMQDFNYLHTNCFEITLELSCDKFPPEEELQREWLGNKEALIQFLEQVHQGIKGMVLDQNYNNLANAVISVSGINHDVTSGDHGDYFRLLLPGIYTVSATAPGYDPETVTVTVGPAEPTLVNFHLKGGSSGGSSGGSSGGSSGGSSGGSSGGSSGGSCPMGCDCFVQEVFCSDEELATVPLDIPPYTKNIIFVETSFTTLETRAFGSNPNLTKVVFLNTQLCQFRPDAFGGLPRLEDLEVTGSSFLNLSTNIFSNLTSLGKLTLNFNMLEALPEGLFQHLAALESLHLQGNQLQALPRRLFQPLTHLKTLNLAQNLLAQLPEELFHPLTSLQTLKLSNNALSGLPQGVFGKLGSLQELFLDSNNISELPPQVFSQLFCLERLWLQRNAITHLPLSIFASLGNLTFLSLQWNMLRVLPAGLFAHTPCLVGLSLTHNQLETVAEGTFAHLSNLRSLMLSYNAITHLPAGIFRDLEELVKLYLGSNNLTALHPALFQNLSKLELLSLSKNQLTTLPEGIFDTNYNLFNLALHGNPWQCDCHLAYLFNWLQQYTDRLLNIQTYCAGPAYLKGQVVPALNEKQLVCLSHNPLDCTSSNIHFITWYKENLHKLEDSEETTCANPPSLRGVKL

SEQ ID NO: 148 - protein, 1021 aa, Artificial Sequence
  hCPN1 variant
GHHHHHHHHHHGSLQDSEVNQEAKPEVKPEVKPETHINLKVSDGSSEIFFKIKKTTPLRRLMEAFAKRQGKEMDSLTFLYDGIEIQADQTPEDLDMEDNDIIEAHREQIGGVTFRHHRYDDLVRTLYKVQNECPGITRVYSIGRSVEGRHLYVLEFSDHPGIHEPLEPEVKYVGNMHGNEALGRELMLQLSEFLCEEFRNRNQRIVQLIQDTRIHILPSMNPDGYEVAAAQGPNKPGYLVGRNNANGVDLNRNFPDLNTYIYYNEKYGGPNHHLPLPDNWKSQVEPETRAVIRWMHSFNFVLSANLHGGAVVANYPYDKSFEHRVRGVRRTASTPTPDDKLFQKLAKVYSYAHGWMFQGWNCGDYFPDGITNGASWYSLSKGMQDFNYLHTNCFEITLELSCDKFPPEEELQREWLGNKEALIQFLEQVHQGIKGMVLDQNYNNLANAVISVSGINHDVTSGDHGDYFRLLLPGIYTVSATAPGYDPETVTVTVGPAEPTLVNFHLKGGSSGGSSGGSSGGSSGGSSGGSSGGSSGGSCPMGCDCFVQEVFCSDEELATVPLDIPPYTKNIIFVETSFTTLETRAFGSNPNLTKVVFLNTQLCQFRPDAFGGLPRLEDLEVTGSSFLNLSTNIFSNLTSLGKLTLNFNMLEALPEGLFQHLAALESLHLQGNQLQALPRRLFQPLTHLKTLNLAQNLLAQLPEELFHPLTSLQTLKLSNNALSGLPQGVFGKLGSLQELFLDSNNISELPPQVFSQLFCLERLWLQRNAITHLPLSIFASLGNLTFLSLQWNMLRVLPAGLFAHTPCLVGLSLTHNQLETVAEGTFAHLSNLRSLMLSYNAITHLPAGIFRDLEELVKLYLGSNNLTALHPALFQNLSKLELLSLSKNQLTTLPEGIFDTNYNLFNLALHGNPWQCDCHLAYLFNWLQQYTDRLLNIQTYCAGPAYLKGQVVPALNEKQLVCELHISSDSFLCDCQLKLWLPPWLIGRMLQAFVTATCAHPESLKGQSIFSVPPESFVCDD

SEQ ID NO: 149 - protein, 958 aa, Artificial Sequence
  hCPN1 variant
GHHHHHHHHHHGSLQDSEVNQEAKPEVKPEVKPETHINLKVSDGSSEIFFKIKKTTPLRRLMEAFAKRQGKEMDSLTFLYDGIEIQADQTPEDLDMEDNDIIEAHREQIGGVTFRHHRYDDLVRTLYKVQNECPGITRVYSIGRSVEGRHLYVLEFSDHPGIHEPLEPEVKYVGNMHGNEALGRELMLQLSEFLCEEFRNRNQRIVQLIQDTRIHILPSMNPDGYEVAAAQGPNKPGYLVGRNNANGVDLNRNFPDLNTYIYYNEKYGGPNHHLPLPDNWKSQVEPETRAVIRWMHSFNFVLSANLHGGAVVANYPYDKSFEHRVRGVRRTASTPTPDDKLFQKLAKVYSYAHGWMFQGWNCGDYFPDGITNGASWYSLSKGMQDFNYLHTNCFEITLELSCDKFPPEEELQREWLGNKEALIQFLEQVHQGIKGMVLDQNYNNLANAVISVSGINHDVTSGDHGDYFRLLLPGIYTVSATAPGYDPETVTVTVGPAEPTLVNFHLKRGGSSGGSSGGSSGGSSGGSSGGSSGGCPMGCDCFVQEVFCSDEELATVPLDIPPYTKNIIFVETSFTTLETRAFGSNPNLTKVVFLNTQLCQFRPDAFGGLPRLEDLEVTGSSFLNLSTNIFSNLTSLGKLTLNFNMLEALPEGLFQHLAALESLHLQGNQLQALPRRLFQPLTHLKTLNLAQNLLAQLPEELFHPLTSLQTLKLSNNALSGLPQGVFGKLGSLQELFLDSNNISELPPQVFSQLFCLERLWLQRNAITHLPLSIFASLGNLTFLSLQWNMLRVLPAGLFAHTPCLVGLSLTHNQLETVAEGTFAHLSNLRSLMLSYNAITHLPAGIFRDLEELVKLYLGSNNLTALHPALFQNLSKLELLSLSKNQLTTLPEGIFDTNYNLFNLALHGNPWQCDCHLAYLFNWLQQYTDRLLNIQTYCAGPAYLKGQVVPALNEKQLVC

SEQ ID NO: 150 - protein, 972 aa, Artificial Sequence
  hCPN1 variant
GHHHHHHHHHHGSLQDSEVNQEAKPEVKPEVKPETHINLKVSDGSSEIFFKIKKTTPLRRLMEAFAKRQGKEMDSLTFLYDGIEIQADQTPEDLDMEDNDIIEAHREQIGGVTFRHHRYDDLVRTLYKVQNECPGITRVYSIGRSVEGRHLYVLEFSDHPGIHEPLEPEVKYVGNMHGNEALGRELMLQLSEFLCEEFRNRNQRIVQLIQDTRIHILPSMNPDGYEVAAAQGPNKPGYLVGRNNANGVDLNRNFPDLNTYIYYNEKYGGPNHHLPLPDNWKSQVEPETRAVIRWMHSFNFVLSANLHGGAVVANYPYDKSFEHRVRGVRRTASTPTPDDKLFQKLAKVYSYAHGWMFQGWNCGDYFPDGITNGASWYSLSKGMQDFNYLHTNCFEITLELSCDKFPPEEELQREWLGNKEALIQFLEQVHQGIKGMVLDQNYNNLANAVISVSGINHDVTSGDHGDYFRLLLPGIYTVSATAPGYDPETVTVTVGPAEPTLVNFHLKRGGSSGGSSGGSSGGSSGGSSGGSSGGSSGGSSGGSSSSGGCPMGCDCFVQEVFCSDEELATVPLDIPPYTKNIIFVETSFTTLETRAFGSNPNLTKVVFLNTQLCQFRPDAFGGLPRLEDLEVTGSSFLNLSTNIFSNLTSLGKLTLNFNMLEALPEGLFQHLAALESLHLQGNQLQALPRRLFQPLTHLKTLNLAQNLLAQLPEELFHPLTSLQTLKLSNNALSGLPQGVFGKLGSLQELFLDSNNISELPPQVFSQLFCLERLWLQRNAITHLPLSIFASLGNLTFLSLQWNMLRVLPAGLFAHTPCLVGLSLTHNQLETVAEGTFAHLSNLRSLMLSYNAITHLPAGIFRDLEELVKLYLGSNNLTALHPALFQNLSKLELLSLSKNQLTTLPEGIFDTNYNLFNLALHGNPWQCDCHLAYLFNWLQQYTDRLLNIQTYCAGPAYLKGQVVPALNEKQLVC

SEQ ID NO: 151 - protein, 948 aa, Artificial Sequence
  hCPN1 variant
GHHHHHHHHHHGSLQDSEVNQEAKPEVKPEVKPETHINLKVSDGSSEIFFKIKKTTPLRRLMEAFAKRQGKEMDSLTFLYDGIEIQADQTPEDLDMEDNDIIEAHREQIGGVTFRHHRYDDLVRTLYKVQNECPGITRVYSIGRSVEGRHLYVLEFSDHPGIHEPLEPEVKYVGNMHGNEALGRELMLQLSEFLCEEFRNRNQRIVQLIQDTRIHILPSMNPDGYEVAAAQGPNKPGYLVGRNNANGVDLNRNFPDLNTYIYYNEKYGGPNHHLPLPDNWKSQVEPETRAVIRWMHSFNFVLSANLHGGAVVANYPYDKSFEHRVRGVRRTASTPTPDDKLFQKLAKVYSYAHGWMFQGWNCGDYFPDGITNGASWYSLSKGMQDFNYLHTNCFEITLELSCDKFPPEEELQREWLGNKEALIQFLEQVHQGIKGMVLDQNYNNLANAVISVSGINHDVTSGDHGDYFRLLLPGIYTVSATAPGYDPETVTVTVGPAEPTLVNFHLKGGSSGGSSGGSSGGSSGGSSGGSSGGCPMGCDCFVQEVFCSDEELATVPLDIPPYTKNIIFVETSFTTLETRAFGSNPNLTKVVFLNTQLCQFRPDAFGGLPRLEDLEVTGSSFLNLSTNIFSNLTSLGKLTLNFNMLEALPEGLFQHLAALESLHLQGNQLQALPRRLFQPLTHLKTLNLAQNLLAQLPEELFHPLTSLQTLKLSNNALSGLPQGVFGKLGSLQELFLDSNNISELPPQVFSQLFCLERLWLQRNAITHLPLSIFASLGNLTFLSLQWNMLRVLPAGLFAHTPCLVGLSLTHNQLETVAEGTFAHLSNLRSLMLSYNAITHLPAGIFRDLEELVKLYLGSNNLTALHPALFQNLSKLELLSLSKNQLTTLPEGIFDTNYNLFNLALSHNPLDCTSSNIHFITWYKENLHKLEDSEETTCANPPSLRGVKL

SEQ ID NO: 152 - protein, 962 aa, Artificial Sequence
  hCPN1 variant
GHHHHHHHHHHGSLQDSEVNQEAKPEVKPEVKPETHINLKVSDGSSEIFFKIKKTTPLRRLMEAFAKRQGKEMDSLTFLYDGIEIQADQTPEDLDMEDNDIIEAHREQIGGVTFRHHRYDDLVRTLYKVQNECPGITRVYSIGRSVEGRHLYVLEFSDHPGIHEPLEPEVKYVGNMHGNEALGRELMLQLSEFLCEEFRNRNQRIVQLIQDTRIHILPSMNPDGYEVAAAQGPNKPGYLVGRNNANGVDLNRNFPDLNTYIYYNEKYGGPNHHLPLPDNWKSQVEPETRAVIRWMHSFNFVLSANLHGGAVVANYPYDKSFEHRVRGVRRTASTPTPDDKLFQKLAKVYSYAHGWMFQGWNCGDYFPDGITNGASWYSLSKGMQDFNYLHTNCFEITLELSCDKFPPEEELQREWLGNKEALIQFLEQVHQGIKGMVLDQNYNNLANAVISVSGINHDVTSGDHGDYFRLLLPGIYTVSATAPGYDPETVTVTVGPAEPTLVNFHLKGGSSGGSSGGSSGGSSGGSSGGSSGGSSGGSSGGSSSSGGCPMGCDCFVQEVFCSDEELATVPLDIPPYTKNIIFVETSFTTLETRAFGSNPNLTKVVFLNTQLCQFRPDAFGGLPRLEDLEVTGSSFLNLSTNIFSNLTSLGKLTLNFNMLEALPEGLFQHLAALESLHLQGNQLQALPRRLFQPLTHLKTLNLAQNLLAQLPEELFHPLTSLQTLKLSNNALSGLPQGVFGKLGSLQELFLDSNNISELPPQVFSQLFCLERLWLQRNAITHLPLSIFASLGNLTFLSLQWNMLRVLPAGLFAHTPCLVGLSLTHNQLETVAEGTFAHLSNLRSLMLSYNAITHLPAGIFRDLEELVKLYLGSNNLTALHPALFQNLSKLELLSLSKNQLTTLPEGIFDTNYNLFNLALSHNPLDCTSSNIHFITWYKENLHKLEDSEETTCANPPSLRGVKL

SEQ ID NO: 153 - protein, 995 aa, Artificial Sequence
  hCPN1 variant
VTFRHHRYDDLVRTLYKVQNECPGITRVYSIGRSVEGRHLYVLEFSDHPGIHEPLEPEVKYVGNMHGNEVLGRELMLQLSEFLCEEFRNRNQRIVQLIQDTRIHILPSMNPDGYEVAAAQGPNKPGYLVGRNNANGVDLNRNFPDLNTYIYYNEKYGGPNHHLPLPDNWKSQVEPETRAVIRWMHSFNFVLSANLHGGAVVANYPYDKSFEHRVRGVRRTASTPTPDDKLFQKLAKVYSYAHGWMFQGWNCGDYFPDGITNGASWYSLSKGMQDFNYLHTNCFEITLELSCDKFPPEEELQREWLGNKEALIQFLEQVHQGIKGMVLDQNYNNLANAVISVSGINHDVTSGDHGDYFRLLLPGIYTVSATAPGYDPETVTVTVGPAEPTLVNFHLKRSGSSGGSSGGSSGDAHKSEVAHRFKDLGEENFKALVLIAFAQYLQQCPFEDHVKLVNEVTEFAKTCVADESAENCDKSLHTLFGDKLCTVATLRETYGEMADCCAKQEPERNECFLQHKDDNPNLPRLVRPEVDVMCTAFHDNEETFLKKYLYEIARRHPYFYAPELLFFAKRYKAAFTECCQAADKAACLLPKLDELRDEGKASSAKQRLKCASLQKFGERAFKAWAVARLSQRFPKAEFAEVSKLVTDLTKVHTECCHGDLLECADDRADLAKYICENQDSISSKLKECCEKPLLEKSHCIAEVENDEMPADLPSLAADFVESKDVCKNYAEAKDVFLGMFLYEYARRHPDYSVVLLLRLAKTYETTLEKCCAAADPHECYAKVFDEFKPLVEEPQNLIKQNCELFEQLGEYKFQNALLVRYTKKVPQVSTPTLVEVSRNLGKVGSKCCKHPEAKRMPCAEDYLSVVLNQLCVLHEKTPVSDRVTKCCTESLVNRRPCFSALEVDETYVPKEFNAETFTFHADICTLSEKERQIKKQTALVELVKHKPKATKEQLKAVMDDFAAFVEKCCKADDKETCFAEEGKKLVAASQAALGL

SEQ ID NO: 154 - protein, 995 aa, Artificial Sequence
  hCPN1 variant
VTFRHHRYDDLVRTLYKVQNECPGITRVYSIGRSVEGRHLYVLEFSDHPGIHEPLEPEVKYVGNMHGDEALGRELMLQLSEFLCEEFRNRNQRIVQLIQDTRIHILPSMNPDGYEVAAAQGPNKSGYLVGRNNANGVDLNRNFPDLNTYIYYNEKYGGPNHHLPLPDNWKSQVEPETRAVIRWMHSFNFVLSANLHGGAVVANYPYDKSFEHRVRGVRRTASTPTPDDKLFQKLAKVYSYAHGWMFQGWNCGDYFPDGITNGASWYSLSKGMQDFNYLHTNCFEITLELSCDKFPPEEELQREWLGNKEALIQFLEQVHQGIKGMVLDQNYNNLANAVISVSGINHDVTSGDHGDYFRLLLPGIYTVSATAPGYDPETVTVTVGPAEPTLVNFHLKRSGSSGGSSGGSSGDAHKSEVAHRFKDLGEENFKALVLIAFAQYLQQCPFEDHVKLVNEVTEFAKTCVADESAENCDKSLHTLFGDKLCTVATLRETYGEMADCCAKQEPERNECFLQHKDDNPNLPRLVRPEVDVMCTAFHDNEETFLKKYLYEIARRHPYFYAPELLFFAKRYKAAFTECCQAADKAACLLPKLDELRDEGKASSAKQRLKCASLQKFGERAFKAWAVARLSQRFPKAEFAEVSKLVTDLTKVHTECCHGDLLECADDRADLAKYICENQDSISSKLKECCEKPLLEKSHCIAEVENDEMPADLPSLAADFVESKDVCKNYAEAKDVFLGMFLYEYARRHPDYSVVLLLRLAKTYETTLEKCCAAADPHECYAKVFDEFKPLVEEPQNLIKQNCELFEQLGEYKFQNALLVRYTKKVPQVSTPTLVEVSRNLGKVGSKCCKHPEAKRMPCAEDYLSVVLNQLCVLHEKTPVSDRVTKCCTESLVNRRPCFSALEVDETYVPKEFNAETFTFHADICTLSEKERQIKKQTALVELVKHKPKATKEQLKAVMDDFAAFVEKCCKADDKETCFAEEGKKLVAASQAALGL

SEQ ID NO: 155 - protein, 995 aa, Artificial Sequence
  hCPN1 variant
VTFRHHRYDDLVRTLYKVQNECPGITRVYSIGRSVEGRHLYVLEFSDHPGIHEPLEPEVKYVGNMHGDEVLGRELMLQLSEFLCEEFRNRNQRIVQLIQDTRIHILPSMNPDGYEVAAAQGPNKSGYLVGRNNANGVDLNRNFPDLNTYIYYNEKYGGPNHHLPLPDNWKSQVEPETRAVIRWMHSFNFVLSANLHGGAVVANYPYDKSFEHRVRGVRRTASTPTPDDKLFQKLAKVYSYAHGWMFQGWNCGDYFPDGITNGASWYSLSKGMQDFNYLHTNCFEITLELSCDKFPPEEELQREWLGNKEALIQFLEQVHQGIKGMVLDQNYNNLANAVISVSGINHDVTSGDHGDYFRLLLPGIYTVSATAPGYDPETVTVTVGPAEPTLVNFHLKRSGSSGGSSGGSSGDAHKSEVAHRFKDLGEENFKALVLIAFAQYLQQCPFEDHVKLVNEVTEFAKTCVADESAENCDKSLHTLFGDKLCTVATLRETYGEMADCCAKQEPERNECFLQHKDDNPNLPRLVRPEVDVMCTAFHDNEETFLKKYLYEIARRHPYFYAPELLFFAKRYKAAFTECCQAADKAACLLPKLDELRDEGKASSAKQRLKCASLQKFGERAFKAWAVARLSQRFPKAEFAEVSKLVTDLTKVHTECCHGDLLECADDRADLAKYICENQDSISSKLKECCEKPLLEKSHCIAEVENDEMPADLPSLAADFVESKDVCKNYAEAKDVFLGMFLYEYARRHPDYSVVLLLRLAKTYETTLEKCCAAADPHECYAKVFDEFKPLVEEPQNLIKQNCELFEQLGEYKFQNALLVRYTKKVPQVSTPTLVEVSRNLGKVGSKCCKHPEAKRMPCAEDYLSVVLNQLCVLHEKTPVSDRVTKCCTESLVNRRPCFSALEVDETYVPKEFNAETFTFHADICTLSEKERQIKKQTALVELVKHKPKATKEQLKAVMDDFAAFVEKCCKADDKETCFAEEGKKLVAASQAALGL

SEQ ID NO: 156 - protein, 1002 aa, Artificial Sequence
  hCPN1 variant
VTFRHHRYDDLVRTLYKVQNECPGITRVYSIGRSVEGRHLYVLEFSDHPGIHEPLEPEVKYVGNMHGNEALGRELMLQLSEFLCEEFRNRNQRIVQLIQDTRIHILPSMNPDGYEVAAAQGPNKPGYLVGRNNANGVDLNRNFPDLNTYIYYNEKYGGPNHHLPLPDNWKSQVEPETRAVIRWMHSFNFVLSANLHGGAVVANYPYDKSFEHRVRGVRRTASTPTPDDKLFQKLAKVYSYAHGWMFQGWNCGDYFPDGITNGASWYSLSKGMQDFNYLHTNCFEITLQLSCDKFPPEEELQREWLGNKEALIQFLEQVHQGIKGMVLDQNYNNLANAVISVSGINHDVTSGDHGDYFRLLLPGIYTVSATAPGYDPETVTVTVGPAEPTLVNFHLKRSENLYFQGGSSGGSSGGSSGDAHKSEVAHRFKDLGEENFKALVLIAFAQYLQQCPFEDHVKLVNEVTEFAKTCVADESAENCDKSLHTLFGDKLCTVATLRETYGEMADCCAKQEPERNECFLQHKDDNPNLPRLVRPEVDVMCTAFHDNEETFLKKYLYEIARRHPYFYAPELLFFAKRYKAAFTECCQAADKAACLLPKLDELRDEGKASSAKQRLKCASLQKFGERAFKAWAVARLSQRFPKAEFAEVSKLVTDLTKVHTECCHGDLLECADDRADLAKYICENQDSISSKLKECCEKPLLEKSHCIAEVENDEMPADLPSLAADFVESKDVCKNYAEAKDVFLGMFLYEYARRHPDYSVVLLLRLAKTYETTLEKCCAAADPHECYAKVFDEFKPLVEEPQNLIKQNCELFEQLGEYKFQNALLVRYTKKVPQVSTPTLVEVSRNLGKVGSKCCKHPEAKRMPCAEDYLSVVLNQLCVLHEKTPVSDRVTKCCTESLVNRRPCFSALEVDETYVPKEFNAETFTFHADICTLSEKERQIKKQTALVELVKHKPKATKEQLKAVMDDFAAFVEKCCKADDKETCFAEEGKKLVAASQAALGL

SEQ ID NO: 157 - protein, 1002 aa, Artificial Sequence
  hCPN1 variant
VTFRHHRYDDLVRTLYKVQNECPGITRVYSIGRSVEGRHLYVLEFSDHPGIHEPLEPEVKYVGNMHGNEALGRELMLQLSEFLCEEFRNRNQRIVQLIQDTRIHILPSMNPDGYEVAAAQGPNKPGYLVGRNNANGVDLNRNFPDLNTYIYYNEKYGGPNHHLPLPDNWKSQVEPETRAVIRWMHSFNFVLSANLHGGAVVANYPYDKSFEHRVRGVRRTASTPTPDDKLFQKLAKVYSYAHGWMFQGWNCGDYFPDGITNGASWFSLSKGMQDFNYLHTNCFEITLELSCDKFPPEEELQREWLGNKEALIQFLEQVHQGIKGMVLDQNYNNLANAVISVSGINHDVTSGDHGDYFRLLLPGIYTVSATAPGYDPETVTVTVGPAEPTLVNFHLKRSENLYFQGGSSGGSSGGSSGDAHKSEVAHRFKDLGEENFKALVLIAFAQYLQQCPFEDHVKLVNEVTEFAKTCVADESAENCDKSLHTLFGDKLCTVATLRETYGEMADCCAKQEPERNECFLQHKDDNPNLPRLVRPEVDVMCTAFHDNEETFLKKYLYEIARRHPYFYAPELLFFAKRYKAAFTECCQAADKAACLLPKLDELRDEGKASSAKQRLKCASLQKFGERAFKAWAVARLSQRFPKAEFAEVSKLVTDLTKVHTECCHGDLLECADDRADLAKYICENQDSISSKLKECCEKPLLEKSHCIAEVENDEMPADLPSLAADFVESKDVCKNYAEAKDVFLGMFLYEYARRHPDYSVVLLLRLAKTYETTLEKCCAAADPHECYAKVFDEFKPLVEEPQNLIKQNCELFEQLGEYKFQNALLVRYTKKVPQVSTPTLVEVSRNLGKVGSKCCKHPEAKRMPCAEDYLSVVLNQLCVLHEKTPVSDRVTKCCTESLVNRRPCFSALEVDETYVPKEFNAETFTFHADICTLSEKERQIKKQTALVELVKHKPKATKEQLKAVMDDFAAFVEKCCKADDKETCFAEEGKKLVAASQAALGL

SEQ ID NO: 158 - protein, 1002 aa, Artificial Sequence
  hCPN1 variant
VTFRHHRYDDLVRTLYKVQNECPGITRVYSIGRSVEGRHLYVLEFSDHPGIHEPLEPEVKYVGNMHGNEALGRELMLQLSEFLCEEFRNRNQRIVQLIQDTRIHILPSMNPDGYEVAAAQGPNKPGYLVGRNNANGVDLNRNFPDLNTYIYYNEKYGGPNHHLPLPDNWKSQVEPETRAVIRWMHSFNFVLSANLHGGAVVANYPYDKSFEHRVRGVRRTASTPTPDDKLFQKLAKVYSYAHGWMFQGWNCGDYFPDGITNGASWFSLSKGMQDFNYLHTNCFEITLQLSCDKFPPEEELQREWLGNKEALIQFLEQVHQGIKGMVLDQNYNNLANAVISVSGINHDVTSGDHGDYFRLLLPGIYTVSATAPGYDPETVTVTVGPAEPTLVNFHLKRSENLYFQGGSSGGSSGGSSGDAHKSEVAHRFKDLGEENFKALVLIAFAQYLQQCPFEDHVKLVNEVTEFAKTCVADESAENCDKSLHTLFGDKLCTVATLRETYGEMADCCAKQEPERNECFLQHKDDNPNLPRLVRPEVDVMCTAFHDNEETFLKKYLYEIARRHPYFYAPELLFFAKRYKAAFTECCQAADKAACLLPKLDELRDEGKASSAKQRLKCASLQKFGERAFKAWAVARLSQRFPKAEFAEVSKLVTDLTKVHTECCHGDLLECADDRADLAKYICENQDSISSKLKECCEKPLLEKSHCIAEVENDEMPADLPSLAADFVESKDVCKNYAEAKDVFLGMFLYEYARRHPDYSVVLLLRLAKTYETTLEKCCAAADPHECYAKVFDEFKPLVEEPQNLIKQNCELFEQLGEYKFQNALLVRYTKKVPQVSTPTLVEVSRNLGKVGSKCCKHPEAKRMPCAEDYLSVVLNQLCVLHEKTPVSDRVTKCCTESLVNRRPCFSALEVDETYVPKEFNAETFTFHADICTLSEKERQIKKQTALVELVKHKPKATKEQLKAVMDDFAAFVEKCCKADDKETCFAEEGKKLVAASQAALGL

SEQ ID NO: 159 - protein, 1002 aa, Artificial Sequence
  hCPN1 variant
VTFRHHRYDDLVRTLYKVQNECPGITRVYSIGRSVEGRHLYVLEFSDHPGIHEPLEPEVKYVGNMHGNEALGRELMLQLSEFLCEEFRNRNQRIVQLIQDTRIHILPSMNPDGYEVAAAQGPNKPGYLVGRNNANGVDLNRNFPDLNTYIYYNEKYGGPNHHLPLPDNWKSQVEPETRAVIRWMHSFNFVLSANLHGGSVVANYPYDKSFEHRVRGVRRTASTPTPDDKLFQKLAKVYSYAHGWMFQGWNCGDYFPDGITNGASWYSLSKGMQDFNYLHTNCFEITLELSCDKFPPEEELQREWLGNKEALIQFLEQVHQGIKGMVLDQNYNNLANAVISVSGINHDVTSGDHGDYFRLLLPGIYTVSATAPGYDPETVTVTVGPAEPTLVNFHLKRSENLYFQGGSSGGSSGGSSGDAHKSEVAHRFKDLGEENFKALVLIAFAQYLQQCPFEDHVKLVNEVTEFAKTCVADESAENCDKSLHTLFGDKLCTVATLRETYGEMADCCAKQEPERNECFLQHKDDNPNLPRLVRPEVDVMCTAFHDNEETFLKKYLYEIARRHPYFYAPELLFFAKRYKAAFTECCQAADKAACLLPKLDELRDEGKASSAKQRLKCASLQKFGERAFKAWAVARLSQRFPKAEFAEVSKLVTDLTKVHTECCHGDLLECADDRADLAKYICENQDSISSKLKECCEKPLLEKSHCIAEVENDEMPADLPSLAADFVESKDVCKNYAEAKDVFLGMFLYEYARRHPDYSVVLLLRLAKTYETTLEKCCAAADPHECYAKVFDEFKPLVEEPQNLIKQNCELFEQLGEYKFQNALLVRYTKKVPQVSTPTLVEVSRNLGKVGSKCCKHPEAKRMPCAEDYLSVVLNQLCVLHEKTPVSDRVTKCCTESLVNRRPCFSALEVDETYVPKEFNAETFTFHADICTLSEKERQIKKQTALVELVKHKPKATKEQLKAVMDDFAAFVEKCCKADDKETCFAEEGKKLVAASQAALGL

SEQ ID NO: 160 - protein, 1002 aa, Artificial Sequence
  hCPN1 variant
VTFRHHRYDDLVRTLYKVQNECPGITRVYSIGRSVEGRHLYVLEFSDHPGIHEPLEPEVKYVGNMHGNEALGRELMLQLSEFLCEEFRNRNQRIVQLIQDTRIHILPSMNPDGYEVAAAQGPNRSGYLVGRNNANGVDLNRNFPDLNTYIYYNEKYGGPNHHLPLPDNWKSQVEPETRAVIRWMHSFNFVLSANLHGGAVVANYPYDKSFEHRVRGVRRTASTPTPDDKLFQKLAKVYSYAHGWMFQGWNCGDYFPDGITNGASWYSLSKGMQDFNYLHTNCFEITLELSCDKFPPEEELQREWLGNKEALIQFLEQVHQGIKGMVLDQNYNNLANAVISVSGINHDVTSGDHGDYFRLLLPGIYTVSATAPGYDPETVTVTVGPAEPTLVNFHLKRSENLYFQGGSSGGSSGGSSGDAHKSEVAHRFKDLGEENFKALVLIAFAQYLQQCPFEDHVKLVNEVTEFAKTCVADESAENCDKSLHTLFGDKLCTVATLRETYGEMADCCAKQEPERNECFLQHKDDNPNLPRLVRPEVDVMCTAFHDNEETFLKKYLYEIARRHPYFYAPELLFFAKRYKAAFTECCQAADKAACLLPKLDELRDEGKASSAKQRLKCASLQKFGERAFKAWAVARLSQRFPKAEFAEVSKLVTDLTKVHTECCHGDLLECADDRADLAKYICENQDSISSKLKECCEKPLLEKSHCIAEVENDEMPADLPSLAADFVESKDVCKNYAEAKDVFLGMFLYEYARRHPDYSVVLLLRLAKTYETTLEKCCAAADPHECYAKVFDEFKPLVEEPQNLIKQNCELFEQLGEYKFQNALLVRYTKKVPQVSTPTLVEVSRNLGKVGSKCCKHPEAKRMPCAEDYLSVVLNQLCVLHEKTPVSDRVTKCCTESLVNRRPCFSALEVDETYVPKEFNAETFTFHADICTLSEKERQIKKQTALVELVKHKPKATKEQLKAVMDDFAAFVEKCCKADDKETCFAEEGKKLVAASQAALGL

SEQ ID NO: 161 - protein, 1002 aa, Artificial Sequence
  hCPN1 variant
VTFRHHRYDDLVRTLYKVQNECPGITRVYSIGRSVEGRHLYVLEFSDHPGIHEPLEPEVKYVGNMHGNEALGRELMLQLSEFLCEEFRNRNQRIVQLIQDTRIHILPSMNPDGYEVAAAQTYNQDGYLVGRNNANGVDLNRNFPDLNTYIYYNEKYGGPNHHLPLPDNWKSQVEPETRAVIRWMHSFNFVLSANLHGGAVVANYPYDKSFEHRVRGVRRTASTPTPDDKLFQKLAKVYSYAHGWMFQGWNCGDYFPDGITNGASWYSLSKGMQDFNYLHTNCFEITLELSCDKFPPEEELQREWLGNKEALIQFLEQVHQGIKGMVLDQNYNNLANAVISVSGINHDVTSGDHGDYFRLLLPGIYTVSATAPGYDPETVTVTVGPAEPTLVNFHLKRSENLYFQGGSSGGSSGGSSGDAHKSEVAHRFKDLGEENFKALVLIAFAQYLQQCPFEDHVKLVNEVTEFAKTCVADESAENCDKSLHTLFGDKLCTVATLRETYGEMADCCAKQEPERNECFLQHKDDNPNLPRLVRPEVDVMCTAFHDNEETFLKKYLYEIARRHPYFYAPELLFFAKRYKAAFTECCQAADKAACLLPKLDELRDEGKASSAKQRLKCASLQKFGERAFKAWAVARLSQRFPKAEFAEVSKLVTDLTKVHTECCHGDLLECADDRADLAKYICENQDSISSKLKECCEKPLLEKSHCIAEVENDEMPADLPSLAADFVESKDVCKNYAEAKDVFLGMFLYEYARRHPDYSVVLLLRLAKTYETTLEKCCAAADPHECYAKVFDEFKPLVEEPQNLIKQNCELFEQLGEYKFQNALLVRYTKKVPQVSTPTLVEVSRNLGKVGSKCCKHPEAKRMPCAEDYLSVVLNQLCVLHEKTPVSDRVTKCCTESLVNRRPCFSALEVDETYVPKEFNAETFTFHADICTLSEKERQIKKQTALVELVKHKPKATKEQLKAVMDDFAAFVEKCCKADDKETCFAEEGKKLVAASQAALGL

SEQ ID NO: 162 - protein, 1002 aa, Artificial Sequence
  hCPN1 variant
VTFRHHRYDDLVRTLYKVQNECPGITRVYSIGRSVEGRHLYVLEFSDHPGIHEPLEPEVKYVGNMHGNEALGRELMLQLSEFLCEEFRNRNQRIVQLIQDTRIHILPSMNPDGYEVAAAQGPYRPGYLVGRNNANGVDLNRNFPDLNTYIYYNEKYGGPNHHLPLPDNWKSQVEPETRAVIRWMHSFNFVLSANLHGGAVVANYPYDKSFEHRVRGVRRTASTPTPDDKLFQKLAKVYSYAHGWMFQGWNCGDYFPDGITNGASWYSLSKGMQDFNYLHTNCFEITLELSCDKFPPEEELQREWLGNKEALIQFLEQVHQGIKGMVLDQNYNNLANAVISVSGINHDVTSGDHGDYFRLLLPGIYTVSATAPGYDPETVTVTVGPAEPTLVNFHLKRSENLYFQGGSSGGSSGGSSGDAHKSEVAHRFKDLGEENFKALVLIAFAQYLQQCPFEDHVKLVNEVTEFAKTCVADESAENCDKSLHTLFGDKLCTVATLRETYGEMADCCAKQEPERNECFLQHKDDNPNLPRLVRPEVDVMCTAFHDNEETFLKKYLYEIARRHPYFYAPELLFFAKRYKAAFTECCQAADKAACLLPKLDELRDEGKASSAKQRLKCASLQKFGERAFKAWAVARLSQRFPKAEFAEVSKLVTDLTKVHTECCHGDLLECADDRADLAKYICENQDSISSKLKECCEKPLLEKSHCIAEVENDEMPADLPSLAADFVESKDVCKNYAEAKDVFLGMFLYEYARRHPDYSVVLLLRLAKTYETTLEKCCAAADPHECYAKVFDEFKPLVEEPQNLIKQNCELFEQLGEYKFQNALLVRYTKKVPQVSTPTLVEVSRNLGKVGSKCCKHPEAKRMPCAEDYLSVVLNQLCVLHEKTPVSDRVTKCCTESLVNRRPCFSALEVDETYVPKEFNAETFTFHADICTLSEKERQIKKQTALVELVKHKPKATKEQLKAVMDDFAAFVEKCCKADDKETCFAEEGKKLVAASQAALGL

SEQ ID NO: 163 - protein, 1002 aa, Artificial Sequence
  hCPN1 variant
VTFRHHRYDDLVRTLYKVQNECPGITRVYSIGRSVEGRHLYVLEFSDHPGIHEPLEPEVKYVGNMHGNEALGRELMLQLSEFLCEEFRNRNQRIVQLIQDTRIHILPSMNPDGYEVAAAQDDTIPGYLVGRNNANGVDLNRNFPDLNTYIYYNEKYGGPNHHLPLPDNWKSQVEPETRAVIRWMHSFNFVLSANLHGGAVVANYPYDKSFEHRVRGVRRTASTPTPDDKLFQKLAKVYSYAHGWMFQGWNCGDYFPDGITNGASWYSLSKGMQDFNYLHTNCFEITLELSCDKFPPEEELQREWLGNKEALIQFLEQVHQGIKGMVLDQNYNNLANAVISVSGINHDVTSGDHGDYFRLLLPGIYTVSATAPGYDPETVTVTVGPAEPTLVNFHLKRSENLYFQGGSSGGSSGGSSGDAHKSEVAHRFKDLGEENFKALVLIAFAQYLQQCPFEDHVKLVNEVTEFAKTCVADESAENCDKSLHTLFGDKLCTVATLRETYGEMADCCAKQEPERNECFLQHKDDNPNLPRLVRPEVDVMCTAFHDNEETFLKKYLYEIARRHPYFYAPELLFFAKRYKAAFTECCQAADKAACLLPKLDELRDEGKASSAKQRLKCASLQKFGERAFKAWAVARLSQRFPKAEFAEVSKLVTDLTKVHTECCHGDLLECADDRADLAKYICENQDSISSKLKECCEKPLLEKSHCIAEVENDEMPADLPSLAADFVESKDVCKNYAEAKDVFLGMFLYEYARRHPDYSVVLLLRLAKTYETTLEKCCAAADPHECYAKVFDEFKPLVEEPQNLIKQNCELFEQLGEYKFQNALLVRYTKKVPQVSTPTLVEVSRNLGKVGSKCCKHPEAKRMPCAEDYLSVVLNQLCVLHEKTPVSDRVTKCCTESLVNRRPCFSALEVDETYVPKEFNAETFTFHADICTLSEKERQIKKQTALVELVKHKPKATKEQLKAVMDDFAAFVEKCCKADDKETCFAEEGKKLVAASQAALGL

SEQ ID NO: 164 - protein, 1002 aa, Artificial Sequence
  hCPN1 variant
VTFRHHRYDDLVRTLYKVQNECPGITRVYSIGRSVEGRHLYVLEFSDHPGIHEPLEPEVKYVGNMHGNEALGRELMLQLSEFLCEEFRNRNQRIVQLIQDTRIHILPSMNPDGYEVAAAQDHNIPGYLVGRNNANGVDLNRNFPDLNTYIYYNEKYGGPNHHLPLPDNWKSQVEPETRAVIRWMHSFNFVLSANLHGGAVVANYPYDKSFEHRVRGVRRTASTPTPDDKLFQKLAKVYSYAHGWMFQGWNCGDYFPDGITNGASWYSLSKGMQDFNYLHTNCFEITLELSCDKFPPEEELQREWLGNKEALIQFLEQVHQGIKGMVLDQNYNNLANAVISVSGINHDVTSGDHGDYFRLLLPGIYTVSATAPGYDPETVTVTVGPAEPTLVNFHLKRSENLYFQGGSSGGSSGGSSGDAHKSEVAHRFKDLGEENFKALVLIAFAQYLQQCPFEDHVKLVNEVTEFAKTCVADESAENCDKSLHTLFGDKLCTVATLRETYGEMADCCAKQEPERNECFLQHKDDNPNLPRLVRPEVDVMCTAFHDNEETFLKKYLYEIARRHPYFYAPELLFFAKRYKAAFTECCQAADKAACLLPKLDELRDEGKASSAKQRLKCASLQKFGERAFKAWAVARLSQRFPKAEFAEVSKLVTDLTKVHTECCHGDLLECADDRADLAKYICENQDSISSKLKECCEKPLLEKSHCIAEVENDEMPADLPSLAADFVESKDVCKNYAEAKDVFLGMFLYEYARRHPDYSVVLLLRLAKTYETTLEKCCAAADPHECYAKVFDEFKPLVEEPQNLIKQNCELFEQLGEYKFQNALLVRYTKKVPQVSTPTLVEVSRNLGKVGSKCCKHPEAKRMPCAEDYLSVVLNQLCVLHEKTPVSDRVTKCCTESLVNRRPCFSALEVDETYVPKEFNAETFTFHADICTLSEKERQIKKQTALVELVKHKPKATKEQLKAVMDDFAAFVEKCCKADDKETCFAEEGKKLVAASQAALGL

SEQ ID NO: 165 - protein, 1002 aa, Artificial Sequence
  hCPN1 variant
VTFRHHRYDDLVRTLYKVQNECPGITRVYSIGRSVEGRHLYVLEFSDHPGIHEPLEPEVKYVGNMHGNEALGRELMLQLSEFLCEEFRNRNQRIVQLIQDTRIHILPSMNPDGYEVAAAQREYIPGYLVGRNNANGVDLNRNFPDLNTYIYYNEKYGGPNHHLPLPDNWKSQVEPETRAVIRWMHSFNFVLSANLHGGAVVANYPYDKSFEHRVRGVRRTASTPTPDDKLFQKLAKVYSYAHGWMFQGWNCGDYFPDGITNGASWYSLSKGMQDFNYLHTNCFEITLELSCDKFPPEEELQREWLGNKEALIQFLEQVHQGIKGMVLDQNYNNLANAVISVSGINHDVTSGDHGDYFRLLLPGIYTVSATAPGYDPETVTVTVGPAEPTLVNFHLKRSENLYFQGGSSGGSSGGSSGDAHKSEVAHRFKDLGEENFKALVLIAFAQYLQQCPFEDHVKLVNEVTEFAKTCVADESAENCDKSLHTLFGDKLCTVATLRETYGEMADCCAKQEPERNECFLQHKDDNPNLPRLVRPEVDVMCTAFHDNEETFLKKYLYEIARRHPYFYAPELLFFAKRYKAAFTECCQAADKAACLLPKLDELRDEGKASSAKQRLKCASLQKFGERAFKAWAVARLSQRFPKAEFAEVSKLVTDLTKVHTECCHGDLLECADDRADLAKYICENQDSISSKLKECCEKPLLEKSHCIAEVENDEMPADLPSLAADFVESKDVCKNYAEAKDVFLGMFLYEYARRHPDYSVVLLLRLAKTYETTLEKCCAAADPHECYAKVFDEFKPLVEEPQNLIKQNCELFEQLGEYKFQNALLVRYTKKVPQVSTPTLVEVSRNLGKVGSKCCKHPEAKRMPCAEDYLSVVLNQLCVLHEKTPVSDRVTKCCTESLVNRRPCFSALEVDETYVPKEFNAETFTFHADICTLSEKERQIKKQTALVELVKHKPKATKEQLKAVMDDFAAFVEKCCKADDKETCFAEEGKKLVAASQAALGL

SEQ ID NO: 166 - protein, 1002 aa, Artificial Sequence
  hCPN1 variant
VTFRHHRYDDLVRTLYKVQNECPGITRVYSIGRSVEGRHLYVLEFSDHPGIHEPLEPEVKYVGNMHGNEALGRELMLQLSEFLCEEFRNRNQRIVQLIQDTRIHILPSMNPDGYEVAAAQDHNQPGYLVGRNNANGVDLNRNFPDLNTYIYYNEKYGGPNHHLPLPDNWKSQVEPETRAVIRWMHSFNFVLSANLHGGAVVANYPYDKSFEHRVRGVRRTASTPTPDDKLFQKLAKVYSYAHGWMFQGWNCGDYFPDGITNGASWYSLSKGMQDFNYLHTNCFEITLELSCDKFPPEEELQREWLGNKEALIQFLEQVHQGIKGMVLDQNYNNLANAVISVSGINHDVTSGDHGDYFRLLLPGIYTVSATAPGYDPETVTVTVGPAEPTLVNFHLKRSENLYFQGGSSGGSSGGSSGDAHKSEVAHRFKDLGEENFKALVLIAFAQYLQQCPFEDHVKLVNEVTEFAKTCVADESAENCDKSLHTLFGDKLCTVATLRETYGEMADCCAKQEPERNECFLQHKDDNPNLPRLVRPEVDVMCTAFHDNEETFLKKYLYEIARRHPYFYAPELLFFAKRYKAAFTECCQAADKAACLLPKLDELRDEGKASSAKQRLKCASLQKFGERAFKAWAVARLSQRFPKAEFAEVSKLVTDLTKVHTECCHGDLLECADDRADLAKYICENQDSISSKLKECCEKPLLEKSHCIAEVENDEMPADLPSLAADFVESKDVCKNYAEAKDVFLGMFLYEYARRHPDYSVVLLLRLAKTYETTLEKCCAAADPHECYAKVFDEFKPLVEEPQNLIKQNCELFEQLGEYKFQNALLVRYTKKVPQVSTPTLVEVSRNLGKVGSKCCKHPEAKRMPCAEDYLSVVLNQLCVLHEKTPVSDRVTKCCTESLVNRRPCFSALEVDETYVPKEFNAETFTFHADICTLSEKERQIKKQTALVELVKHKPKATKEQLKAVMDDFAAFVEKCCKADDKETCFAEEGKKLVAASQAALGL

SEQ ID NO: 167 - protein, 1002 aa, Artificial Sequence
  hCPN1 variant
VTFRHHRYDDLVRTLYKVQNECPGITRVYSIGRSVEGRHLYVLEFSDHPGIHEPLEPEVKYVGNMHGNEALGRELMLQLSEFLCEEFRNRNQRIVQLIQDTRIHILPSMNPDGYEVAAAQIPDKPGYLVGRNNANGVDLNRNFPDLNTYIYYNEKYGGPNHHLPLPDNWKSQVEPETRAVIRWMHSFNFVLSANLHGGAVVANYPYDKSFEHRVRGVRRTASTPTPDDKLFQKLAKVYSYAHGWMFQGWNCGDYFPDGITNGASWYSLSKGMQDFNYLHTNCFEITLELSCDKFPPEEELQREWLGNKEALIQFLEQVHQGIKGMVLDQNYNNLANAVISVSGINHDVTSGDHGDYFRLLLPGIYTVSATAPGYDPETVTVTVGPAEPTLVNFHLKRSENLYFQGGSSGGSSGGSSGDAHKSEVAHRFKDLGEENFKALVLIAFAQYLQQCPFEDHVKLVNEVTEFAKTCVADESAENCDKSLHTLFGDKLCTVATLRETYGEMADCCAKQEPERNECFLQHKDDNPNLPRLVRPEVDVMCTAFHDNEETFLKKYLYEIARRHPYFYAPELLFFAKRYKAAFTECCQAADKAACLLPKLDELRDEGKASSAKQRLKCASLQKFGERAFKAWAVARLSQRFPKAEFAEVSKLVTDLTKVHTECCHGDLLECADDRADLAKYICENQDSISSKLKECCEKPLLEKSHCIAEVENDEMPADLPSLAADFVESKDVCKNYAEAKDVFLGMFLYEYARRHPDYSVVLLLRLAKTYETTLEKCCAAADPHECYAKVFDEFKPLVEEPQNLIKQNCELFEQLGEYKFQNALLVRYTKKVPQVSTPTLVEVSRNLGKVGSKCCKHPEAKRMPCAEDYLSVVLNQLCVLHEKTPVSDRVTKCCTESLVNRRPCFSALEVDETYVPKEFNAETFTFHADICTLSEKERQIKKQTALVELVKHKPKATKEQLKAVMDDFAAFVEKCCKADDKETCFAEEGKKLVAASQAALGL

SEQ ID NO: 168 - protein, 1002 aa, Artificial Sequence
  hCPN1 variant
VTFRHHRYDDLVRTLYKVQNECPGITRVYSIGRSVEGRHLYVLEFSDHPGIHEPLEPEVKYVGNMHGNEALGRELMLQLSEFLCEEFRNRNQRIVQLIQDTRIHILPSMNPDGYEVAAAQGWRYPGYLVGRNNANGVDLNRNFPDLNTYIYYNEKYGGPNHHLPLPDNWKSQVEPETRAVIRWMHSFNFVLSANLHGGAVVANYPYDKSFEHRVRGVRRTASTPTPDDKLFQKLAKVYSYAHGWMFQGWNCGDYFPDGITNGASWYSLSKGMQDFNYLHTNCFEITLELSCDKFPPEEELQREWLGNKEALIQFLEQVHQGIKGMVLDQNYNNLANAVISVSGINHDVTSGDHGDYFRLLLPGIYTVSATAPGYDPETVTVTVGPAEPTLVNFHLKRSENLYFQGGSSGGSSGGSSGDAHKSEVAHRFKDLGEENFKALVLIAFAQYLQQCPFEDHVKLVNEVTEFAKTCVADESAENCDKSLHTLFGDKLCTVATLRETYGEMADCCAKQEPERNECFLQHKDDNPNLPRLVRPEVDVMCTAFHDNEETFLKKYLYEIARRHPYFYAPELLFFAKRYKAAFTECCQAADKAACLLPKLDELRDEGKASSAKQRLKCASLQKFGERAFKAWAVARLSQRFPKAEFAEVSKLVTDLTKVHTECCHGDLLECADDRADLAKYICENQDSISSKLKECCEKPLLEKSHCIAEVENDEMPADLPSLAADFVESKDVCKNYAEAKDVFLGMFLYEYARRHPDYSVVLLLRLAKTYETTLEKCCAAADPHECYAKVFDEFKPLVEEPQNLIKQNCELFEQLGEYKFQNALLVRYTKKVPQVSTPTLVEVSRNLGKVGSKCCKHPEAKRMPCAEDYLSVVLNQLCVLHEKTPVSDRVTKCCTESLVNRRPCFSALEVDETYVPKEFNAETFTFHADICTLSEKERQIKKQTALVELVKHKPKATKEQLKAVMDDFAAFVEKCCKADDKETCFAEEGKKLVAASQAALGL

SEQ ID NO: 169 - protein, 1002 aa, Artificial Sequence
  hCPN1 variant
VTFRHHRYDDLVRTLYKVQNECPGITRVYSIGRSVEGRHLYVLEFSDHPGIHEPLEPEVKYVGNMHGNEALGRELMLQLSEFLCEEFRNRNQRIVQLIQDTRIHILPSMNPDGYEVAAAQGYRYPGYLVGRNNANGVDLNRNFPDLNTYIYYNEKYGGPNHHLPLPDNWKSQVEPETRAVIRWMHSFNFVLSANLHGGAVVANYPYDKSFEHRVRGVRRTASTPTPDDKLFQKLAKVYSYAHGWMFQGWNCGDYFPDGITNGASWYSLSKGMQDFNYLHTNCFEITLELSCDKFPPEEELQREWLGNKEALIQFLEQVHQGIKGMVLDQNYNNLANAVISVSGINHDVTSGDHGDYFRLLLPGIYTVSATAPGYDPETVTVTVGPAEPTLVNFHLKRSENLYFQGGSSGGSSGGSSGDAHKSEVAHRFKDLGEENFKALVLIAFAQYLQQCPFEDHVKLVNEVTEFAKTCVADESAENCDKSLHTLFGDKLCTVATLRETYGEMADCCAKQEPERNECFLQHKDDNPNLPRLVRPEVDVMCTAFHDNEETFLKKYLYEIARRHPYFYAPELLFFAKRYKAAFTECCQAADKAACLLPKLDELRDEGKASSAKQRLKCASLQKFGERAFKAWAVARLSQRFPKAEFAEVSKLVTDLTKVHTECCHGDLLECADDRADLAKYICENQDSISSKLKECCEKPLLEKSHCIAEVENDEMPADLPSLAADFVESKDVCKNYAEAKDVFLGMFLYEYARRHPDYSVVLLLRLAKTYETTLEKCCAAADPHECYAKVFDEFKPLVEEPQNLIKQNCELFEQLGEYKFQNALLVRYTKKVPQVSTPTLVEVSRNLGKVGSKCCKHPEAKRMPCAEDYLSVVLNQLCVLHEKTPVSDRVTKCCTESLVNRRPCFSALEVDETYVPKEFNAETFTFHADICTLSEKERQIKKQTALVELVKHKPKATKEQLKAVMDDFAAFVEKCCKADDKETCFAEEGKKLVAASQAALGL

SEQ ID NO: 170 - protein, 1002 aa, Artificial Sequence
  hCPN1 variant
VTFRHHRYDDLVRTLYKVQNECPGITRVYSIGRSVEGRHLYVLEFSDHPGIHEPLEPEVKYVGNMHGNEALGRELMLQLSEFLCEEFRNRNQRIVQLIQDTRIHILPSMNPDGYEVAAAQGPNQPGYLVGRNNANGVDLNRNFPDLNTYIYYNEKYGGPNHHLPLPDNWKSQVEPETRAVIRWMHSFNFVLSANLHGGAVVANYPYDKSFEHRVRGVRRTASTPTPDDKLFQKLAKVYSYAHGWMFQGWNCGDYFPDGITNGASWYSLSKGMQDFNYLHTNCFEITLELSCDKFPPEEELQREWLGNKEALIQFLEQVHQGIKGMVLDQNYNNLANAVISVSGINHDVTSGDHGDYFRLLLPGIYTVSATAPGYDPETVTVTVGPAEPTLVNFHLKRSENLYFQGGSSGGSSGGSSGDAHKSEVAHRFKDLGEENFKALVLIAFAQYLQQCPFEDHVKLVNEVTEFAKTCVADESAENCDKSLHTLFGDKLCTVATLRETYGEMADCCAKQEPERNECFLQHKDDNPNLPRLVRPEVDVMCTAFHDNEETFLKKYLYEIARRHPYFYAPELLFFAKRYKAAFTECCQAADKAACLLPKLDELRDEGKASSAKQRLKCASLQKFGERAFKAWAVARLSQRFPKAEFAEVSKLVTDLTKVHTECCHGDLLECADDRADLAKYICENQDSISSKLKECCEKPLLEKSHCIAEVENDEMPADLPSLAADFVESKDVCKNYAEAKDVFLGMFLYEYARRHPDYSVVLLLRLAKTYETTLEKCCAAADPHECYAKVFDEFKPLVEEPQNLIKQNCELFEQLGEYKFQNALLVRYTKKVPQVSTPTLVEVSRNLGKVGSKCCKHPEAKRMPCAEDYLSVVLNQLCVLHEKTPVSDRVTKCCTESLVNRRPCFSALEVDETYVPKEFNAETFTFHADICTLSEKERQIKKQTALVELVKHKPKATKEQLKAVMDDFAAFVEKCCKADDKETCFAEEGKKLVAASQAALGL

SEQ ID NO: 171 - protein, 1002 aa, Artificial Sequence
  hCPN1 variant
VTFRHHRYDDLVRTLYKVQNECPGITRVYSIGRSVEGRHLYVLEFSDHPGIHEPLEPEVKYVGNMHGNEALGRELMLQLSEFLCEEFRNRNQRIVQLIQDTRIHILPSMNPDGYEVAAAQTYNQDGYLVGRNNANGVDLNRNFPDLNTYIYYNEKYGGPNHHLPLPDNWKSQVEPETRAVIRWMHSFNFVLSANLHGGAVVANYPYDKSFEHRVRGVRRTASTPTPDDKLFQKLAKVYSYAHGWMFQGWNCGDYFPDGITNGASWYSLSKGMQDFNYLHTNCFEITLELSCDKFPPPQELQREWLGNKEALIQFLEQVHQGIKGMVLDQNYNNLANAVISVSGINHDVTSGDHGDYFRLLLPGIYTVSATAPGYDPETVTVTVGPAEPTLVNFHLKRSENLYFQGGSSGGSSGGSSGDAHKSEVAHRFKDLGEENFKALVLIAFAQYLQQCPFEDHVKLVNEVTEFAKTCVADESAENCDKSLHTLFGDKLCTVATLRETYGEMADCCAKQEPERNECFLQHKDDNPNLPRLVRPEVDVMCTAFHDNEETFLKKYLYEIARRHPYFYAPELLFFAKRYKAAFTECCQAADKAACLLPKLDELRDEGKASSAKQRLKCASLQKFGERAFKAWAVARLSQRFPKAEFAEVSKLVTDLTKVHTECCHGDLLECADDRADLAKYICENQDSISSKLKECCEKPLLEKSHCIAEVENDEMPADLPSLAADFVESKDVCKNYAEAKDVFLGMFLYEYARRHPDYSVVLLLRLAKTYETTLEKCCAAADPHECYAKVFDEFKPLVEEPQNLIKQNCELFEQLGEYKFQNALLVRYTKKVPQVSTPTLVEVSRNLGKVGSKCCKHPEAKRMPCAEDYLSVVLNQLCVLHEKTPVSDRVTKCCTESLVNRRPCFSALEVDETYVPKEFNAETFTFHADICTLSEKERQIKKQTALVELVKHKPKATKEQLKAVMDDFAAFVEKCCKADDKETCFAEEGKKLVAASQAALGL

SEQ ID NO: 172 - protein, 1002 aa, Artificial Sequence
  hCPN1 variant
VTFRHHRYDDLVRTLYKVQNECPGITRVYSIGRSVEGRHLYVLEFSDHPGIHEPLEPEVKYVGNMHGNEALGRELMLQLSEFLCEEFRNRNQRIVQLIQDTRIHILPSMNPDGYEVAAAQTYNQDGYLVGRNNANGVDLNRNFPDLNTYIYYNEKYGGPNHHLPLPDNWKSQVEPETRAVIRWMHSFNFVLSANLHGGAVVANYPYDKSFEHRVRGVRRTASTPTPDDKLFQKLAKVYSYAHGWMFQGWNCGDYFPDGITNGASWYSLSKGMQDFNYLHTNCFEITLELSCDKFPPPEELQREWLGNKEALIQFLEQVHQGIKGMVLDQNYNNLANAVISVSGINHDVTSGDHGDYFRLLLPGIYTVSATAPGYDPETVTVTVGPAEPTLVNFHLKRSENLYFQGGSSGGSSGGSSGDAHKSEVAHRFKDLGEENFKALVLIAFAQYLQQCPFEDHVKLVNEVTEFAKTCVADESAENCDKSLHTLFGDKLCTVATLRETYGEMADCCAKQEPERNECFLQHKDDNPNLPRLVRPEVDVMCTAFHDNEETFLKKYLYEIARRHPYFYAPELLFFAKRYKAAFTECCQAADKAACLLPKLDELRDEGKASSAKQRLKCASLQKFGERAFKAWAVARLSQRFPKAEFAEVSKLVTDLTKVHTECCHGDLLECADDRADLAKYICENQDSISSKLKECCEKPLLEKSHCIAEVENDEMPADLPSLAADFVESKDVCKNYAEAKDVFLGMFLYEYARRHPDYSVVLLLRLAKTYETTLEKCCAAADPHECYAKVFDEFKPLVEEPQNLIKQNCELFEQLGEYKFQNALLVRYTKKVPQVSTPTLVEVSRNLGKVGSKCCKHPEAKRMPCAEDYLSVVLNQLCVLHEKTPVSDRVTKCCTESLVNRRPCFSALEVDETYVPKEFNAETFTFHADICTLSEKERQIKKQTALVELVKHKPKATKEQLKAVMDDFAAFVEKCCKADDKETCFAEEGKKLVAASQAALGL

SEQ ID NO: 173 - protein, 1002 aa, Artificial Sequence
  hCPN1 variant
VTFRHHRYDDLVRTLYKVQNECPGITRVYSIGRSVEGRHLYVLEFSDHPGIHEPLEPEVKYVGNMHGNEALGRELMLQLSEFLCEEFRNRNQRIVQLIQDTRIHILPSMNPDGYEVAAAQGPNKPGYLVGRNNANGVDLNRNFPDLNTYIYYNEKYGGPNHHLPLPDNWKSQVEPETRAVIRWMHSFNFVLSANLHGGAVVANYPYDKSFEHRVRGVRRTASTPTPDDKLFQKLAKVYSYAHGWMFQGWNCGDYFPDGITNGASWYSLSKGMQDFNYLHTNCFEITLELSCIIWPPEEELQREWLGNKEALIQFLEQVHQGIKGMVLDQNYNNLANAVISVSGINHDVTSGDHGDYFRLLLPGIYTVSATAPGYDPETVTVTVGPAEPTLVNFHLKRSENLYFQGGSSGGSSGGSSGDAHKSEVAHRFKDLGEENFKALVLIAFAQYLQQCPFEDHVKLVNEVTEFAKTCVADESAENCDKSLHTLFGDKLCTVATLRETYGEMADCCAKQEPERNECFLQHKDDNPNLPRLVRPEVDVMCTAFHDNEETFLKKYLYEIARRHPYFYAPELLFFAKRYKAAFTECCQAADKAACLLPKLDELRDEGKASSAKQRLKCASLQKFGERAFKAWAVARLSQRFPKAEFAEVSKLVTDLTKVHTECCHGDLLECADDRADLAKYICENQDSISSKLKECCEKPLLEKSHCIAEVENDEMPADLPSLAADFVESKDVCKNYAEAKDVFLGMFLYEYARRHPDYSVVLLLRLAKTYETTLEKCCAAADPHECYAKVFDEFKPLVEEPQNLIKQNCELFEQLGEYKFQNALLVRYTKKVPQVSTPTLVEVSRNLGKVGSKCCKHPEAKRMPCAEDYLSVVLNQLCVLHEKTPVSDRVTKCCTESLVNRRPCFSALEVDETYVPKEFNAETFTFHADICTLSEKERQIKKQTALVELVKHKPKATKEQLKAVMDDFAAFVEKCCKADDKETCFAEEGKKLVAASQAALGL

SEQ ID NO: 174 - protein, 1002 aa, Artificial Sequence
  hCPN1 variant
VTFRHHRYDDLVRTLYKVQNECPGITRVYSIGRSVEGRHLYVLEFSDHPGIHEPLEPEVKYVGNMHGNEALGRELMLQLSEFLCEEFRNRNQRIVQLIQDTRIHILPSMNPDGYEVAAAQGPNKPGYLVGRNNANGVDLNRNFPDLNTYIYYNEKYGGPNHHLPLPDNWKSQVEPETRAVIRWMHSFNFVLSANLHGGAVVANYPYDKSFEHRVRGVRRTASTPTPDDKLFQKLAKVYSYAHGWMFQGWNCGDYFPDGITNGASWYSLSKGMQDFNYLHTNCFEITLELSCDLFPPPQELQREWLGNKEALIQFLEQVHQGIKGMVLDQNYNNLANAVISVSGINHDVTSGDHGDYFRLLLPGIYTVSATAPGYDPETVTVTVGPAEPTLVNFHLKRSENLYFQGGSSGGSSGGSSGDAHKSEVAHRFKDLGEENFKALVLIAFAQYLQQCPFEDHVKLVNEVTEFAKTCVADESAENCDKSLHTLFGDKLCTVATLRETYGEMADCCAKQEPERNECFLQHKDDNPNLPRLVRPEVDVMCTAFHDNEETFLKKYLYEIARRHPYFYAPELLFFAKRYKAAFTECCQAADKAACLLPKLDELRDEGKASSAKQRLKCASLQKFGERAFKAWAVARLSQRFPKAEFAEVSKLVTDLTKVHTECCHGDLLECADDRADLAKYICENQDSISSKLKECCEKPLLEKSHCIAEVENDEMPADLPSLAADFVESKDVCKNYAEAKDVFLGMFLYEYARRHPDYSVVLLLRLAKTYETTLEKCCAAADPHECYAKVFDEFKPLVEEPQNLIKQNCELFEQLGEYKFQNALLVRYTKKVPQVSTPTLVEVSRNLGKVGSKCCKHPEAKRMPCAEDYLSVVLNQLCVLHEKTPVSDRVTKCCTESLVNRRPCFSALEVDETYVPKEFNAETFTFHADICTLSEKERQIKKQTALVELVKHKPKATKEQLKAVMDDFAAFVEKCCKADDKETCFAEEGKKLVAASQAALGL

SEQ ID NO: 175 - protein, 1002 aa, Artificial Sequence
  hCPN1 variant
VTFRHHRYDDLVRTLYKVQNECPGITRVYSIGRSVEGRHLYVLEFSDHPGIHEPLEPEVKYVGNMHGNEALGRELMLQLSEFLCEEFRNRNQRIVQLIQDTRIHILPSMNPDGYEVAAAQGPNKPGYLVGRNNANGVDLNRNFPDLNTYIYYNEKYGGPNHHLPLPDNWKSQVEPETRAVIRWMHSFNFVLSANLHGGAVVANYPYDKSFEHRVRGVRRTASTPTPDDKLFQKLAKVYSYAHGWMFQGWNCGDYFPDGITNGASWYSLSKGMQDFNYLHTNCFEITLELSCLIFLPEEELQREWLGNKEALIQFLEQVHQGIKGMVLDQNYNNLANAVISVSGINHDVTSGDHGDYFRLLLPGIYTVSATAPGYDPETVTVTVGPAEPTLVNFHLKRSENLYFQGGSSGGSSGGSSGDAHKSEVAHRFKDLGEENFKALVLIAFAQYLQQCPFEDHVKLVNEVTEFAKTCVADESAENCDKSLHTLFGDKLCTVATLRETYGEMADCCAKQEPERNECFLQHKDDNPNLPRLVRPEVDVMCTAFHDNEETFLKKYLYEIARRHPYFYAPELLFFAKRYKAAFTECCQAADKAACLLPKLDELRDEGKASSAKQRLKCASLQKFGERAFKAWAVARLSQRFPKAEFAEVSKLVTDLTKVHTECCHGDLLECADDRADLAKYICENQDSISSKLKECCEKPLLEKSHCIAEVENDEMPADLPSLAADFVESKDVCKNYAEAKDVFLGMFLYEYARRHPDYSVVLLLRLAKTYETTLEKCCAAADPHECYAKVFDEFKPLVEEPQNLIKQNCELFEQLGEYKFQNALLVRYTKKVPQVSTPTLVEVSRNLGKVGSKCCKHPEAKRMPCAEDYLSVVLNQLCVLHEKTPVSDRVTKCCTESLVNRRPCFSALEVDETYVPKEFNAETFTFHADICTLSEKERQIKKQTALVELVKHKPKATKEQLKAVMDDFAAFVEKCCKADDKETCFAEEGKKLVAASQAALGL

SEQ ID NO: 176 - protein, 1002 aa, Artificial Sequence
  hCPN1 variant
VTFRHHRYDDLVRTLYKVQNECPGITRVYSIGRSVEGRHLYVLEFSDHPGIHEPLEPEVKYVGNMHGNEALGRELMLQLSEFLCEEFRNRNQRIVQLIQDTRIHILPSMNPDGYEVAAAQGPNKPGYLVGRNNANGVDLNRNFPDLNTYIYYNEKYGGPNHHLPLPDNWKSQVEPETRAVIRWMHSFNFVLSANLHGGAVVANYPYDKSFEHRVRGVRRTASTPTPDDKLFQKLAKVYSYAHGWMFQGWNCGDYFPDGITNGASWYSLSKGMQDFNYLHTNCFEITLELSCLIFPPEEELQREWLGNKEALIQFLEQVHQGIKGMVLDQNYNNLANAVISVSGINHDVTSGDHGDYFRLLLPGIYTVSATAPGYDPETVTVTVGPAEPTLVNFHLKRSENLYFQGGSSGGSSGGSSGDAHKSEVAHRFKDLGEENFKALVLIAFAQYLQQCPFEDHVKLVNEVTEFAKTCVADESAENCDKSLHTLFGDKLCTVATLRETYGEMADCCAKQEPERNECFLQHKDDNPNLPRLVRPEVDVMCTAFHDNEETFLKKYLYEIARRHPYFYAPELLFFAKRYKAAFTECCQAADKAACLLPKLDELRDEGKASSAKQRLKCASLQKFGERAFKAWAVARLSQRFPKAEFAEVSKLVTDLTKVHTECCHGDLLECADDRADLAKYICENQDSISSKLKECCEKPLLEKSHCIAEVENDEMPADLPSLAADFVESKDVCKNYAEAKDVFLGMFLYEYARRHPDYSVVLLLRLAKTYETTLEKCCAAADPHECYAKVFDEFKPLVEEPQNLIKQNCELFEQLGEYKFQNALLVRYTKKVPQVSTPTLVEVSRNLGKVGSKCCKHPEAKRMPCAEDYLSVVLNQLCVLHEKTPVSDRVTKCCTESLVNRRPCFSALEVDETYVPKEFNAETFTFHADICTLSEKERQIKKQTALVELVKHKPKATKEQLKAVMDDFAAFVEKCCKADDKETCFAEEGKKLVAASQAALGL

SEQ ID NO: 177 - protein, 1002 aa, Artificial Sequence
  hCPN1 variant
VTFRHHRYDDLVRTLYKVQNECPGITRVYSIGRSVEGRHLYVLEFSDHPGIHEPLEPEVKYVGNMHGNEALGRELMLQLSEFLCEEFRNRNQRIVQLIQDTRIHILPSMNPDGYEVAAAQGPNKPGYLVGRNNANGVDLNRNFPDLNTYIYYNEKYGGPNHHLPLPDNWKSQVEPETRAVIRWMHSFNFVLSANLHGGAVVANYPYDKSFEHRVRGVRRTASTPTPDDKLFQKLAKVYSYAHGWMFQGWNCGDYFPDGITNGASWYSLSKGMQDFNYLHTNCFEITLELSCNAFTPESELQREWLGNKEALIQFLEQVHQGIKGMVLDQNYNNLANAVISVSGINHDVTSGDHGDYFRLLLPGIYTVSATAPGYDPETVTVTVGPAEPTLVNFHLKRSENLYFQGGSSGGSSGGSSGDAHKSEVAHRFKDLGEENFKALVLIAFAQYLQQCPFEDHVKLVNEVTEFAKTCVADESAENCDKSLHTLFGDKLCTVATLRETYGEMADCCAKQEPERNECFLQHKDDNPNLPRLVRPEVDVMCTAFHDNEETFLKKYLYEIARRHPYFYAPELLFFAKRYKAAFTECCQAADKAACLLPKLDELRDEGKASSAKQRLKCASLQKFGERAFKAWAVARLSQRFPKAEFAEVSKLVTDLTKVHTECCHGDLLECADDRADLAKYICENQDSISSKLKECCEKPLLEKSHCIAEVENDEMPADLPSLAADFVESKDVCKNYAEAKDVFLGMFLYEYARRHPDYSVVLLLRLAKTYETTLEKCCAAADPHECYAKVFDEFKPLVEEPQNLIKQNCELFEQLGEYKFQNALLVRYTKKVPQVSTPTLVEVSRNLGKVGSKCCKHPEAKRMPCAEDYLSVVLNQLCVLHEKTPVSDRVTKCCTESLVNRRPCFSALEVDETYVPKEFNAETFTFHADICTLSEKERQIKKQTALVELVKHKPKATKEQLKAVMDDFAAFVEKCCKADDKETCFAEEGKKLVAASQAALGL

SEQ ID NO: 178 - protein, 1002 aa, Artificial Sequence
  hCPN1 variant
VTFRHHRYDDLVRTLYKVQNECPGITRVYSIGRSVEGRHLYVLEFSDHPGIHEPLEPEVKYVGNMHGNEALGRELMLQLSEFLCEEFRNRNQRIVQLIQDTRIHILPSMNPDGYEVAAAQGPNKPGYLVGRNNANGVDLNRNFPDLNTYIYYNEKYGGPNHHLPLPDNWKSQVEPETRAVIRWMHSFNFVLSANLHGGAVVANYPYDKSFEHRVRGVRRTASTPTPDDKLFQKLAKVYSYAHGWMFQGWNCGDYFPDGITNGASWYSLSKGMQDFNYLHTNCFEITLELSCNAFPPESELQREWLGNKEALIQFLEQVHQGIKGMVLDQNYNNLANAVISVSGINHDVTSGDHGDYFRLLLPGIYTVSATAPGYDPETVTVTVGPAEPTLVNFHLKRSENLYFQGGSSGGSSGGSSGDAHKSEVAHRFKDLGEENFKALVLIAFAQYLQQCPFEDHVKLVNEVTEFAKTCVADESAENCDKSLHTLFGDKLCTVATLRETYGEMADCCAKQEPERNECFLQHKDDNPNLPRLVRPEVDVMCTAFHDNEETFLKKYLYEIARRHPYFYAPELLFFAKRYKAAFTECCQAADKAACLLPKLDELRDEGKASSAKQRLKCASLQKFGERAFKAWAVARLSQRFPKAEFAEVSKLVTDLTKVHTECCHGDLLECADDRADLAKYICENQDSISSKLKECCEKPLLEKSHCIAEVENDEMPADLPSLAADFVESKDVCKNYAEAKDVFLGMFLYEYARRHPDYSVVLLLRLAKTYETTLEKCCAAADPHECYAKVFDEFKPLVEEPQNLIKQNCELFEQLGEYKFQNALLVRYTKKVPQVSTPTLVEVSRNLGKVGSKCCKHPEAKRMPCAEDYLSVVLNQLCVLHEKTPVSDRVTKCCTESLVNRRPCFSALEVDETYVPKEFNAETFTFHADICTLSEKERQIKKQTALVELVKHKPKATKEQLKAVMDDFAAFVEKCCKADDKETCFAEEGKKLVAASQAALGL

SEQ ID NO: 179 - protein, 1002 aa, Artificial Sequence
  hCPN1 variant
VTFRHHRYDDLVRTLYKVQNECPGITRVYSIGRSVEGRHLYVLEFSDHPGIHEPLEPEVKYVGNMHGNEALGRELMLQLSEFLCEEFRNRNQRIVQLIQDTRIHILPSMNPDGYEVAAAQGPNKPGYLVGRNNANGVDLNRNFPDLNTYIYYNEKYGGPNHHLPLPDNWKSQVEPETRAVIRWMHSFNFVLSANLHGGAVVANYPYDKSFEHRVRGVRRTASTPTPDDKLFQKLAKVYSYAHGWMFQGWNCGDYFPDGITNGASWYSLSKGMQDFNYLHTNCFEITLELSCIAWPPEEELQREWLGNKEALIQFLEQVHQGIKGMVLDQNYNNLANAVISVSGINHDVTSGDHGDYFRLLLPGIYTVSATAPGYDPETVTVTVGPAEPTLVNFHLKRSENLYFQGGSSGGSSGGSSGDAHKSEVAHRFKDLGEENFKALVLIAFAQYLQQCPFEDHVKLVNEVTEFAKTCVADESAENCDKSLHTLFGDKLCTVATLRETYGEMADCCAKQEPERNECFLQHKDDNPNLPRLVRPEVDVMCTAFHDNEETFLKKYLYEIARRHPYFYAPELLFFAKRYKAAFTECCQAADKAACLLPKLDELRDEGKASSAKQRLKCASLQKFGERAFKAWAVARLSQRFPKAEFAEVSKLVTDLTKVHTECCHGDLLECADDRADLAKYICENQDSISSKLKECCEKPLLEKSHCIAEVENDEMPADLPSLAADFVESKDVCKNYAEAKDVFLGMFLYEYARRHPDYSVVLLLRLAKTYETTLEKCCAAADPHECYAKVFDEFKPLVEEPQNLIKQNCELFEQLGEYKFQNALLVRYTKKVPQVSTPTLVEVSRNLGKVGSKCCKHPEAKRMPCAEDYLSVVLNQLCVLHEKTPVSDRVTKCCTESLVNRRPCFSALEVDETYVPKEFNAETFTFHADICTLSEKERQIKKQTALVELVKHKPKATKEQLKAVMDDFAAFVEKCCKADDKETCFAEEGKKLVAASQAALGL

SEQ ID NO: 180 - protein, 1002 aa, Artificial Sequence
  hCPN1 variant
VTFRHHRYDDLVRTLYKVQNECPGITRVYSIGRSVEGRHLYVLEFSDHPGIHEPLEPEVKYVGNMHGNEALGRELMLQLSEFLCEEFRNRNQRIVQLIQDTRIHILPSMNPDGYEVAAAQGPNKPGYLVGRNNANGVDLNRNFPDLNTYIYYNEKYGGPNHHLPLPDNWKSQVEPETRAVIRWMHSFNFVLSANLHGGAVVANYPYDKSFEHRVRGVRRTASTPTPDDKLFQKLAKVYSYAHGWMFQGWNCGDYFPDGITNGASWYSLSKGMQDFNYLHTNCFEITLELSCLAWPPEEELQREWLGNKEALIQFLEQVHQGIKGMVLDQNYNNLANAVISVSGINHDVTSGDHGDYFRLLLPGIYTVSATAPGYDPETVTVTVGPAEPTLVNFHLKRSENLYFQGGSSGGSSGGSSGDAHKSEVAHRFKDLGEENFKALVLIAFAQYLQQCPFEDHVKLVNEVTEFAKTCVADESAENCDKSLHTLFGDKLCTVATLRETYGEMADCCAKQEPERNECFLQHKDDNPNLPRLVRPEVDVMCTAFHDNEETFLKKYLYEIARRHPYFYAPELLFFAKRYKAAFTECCQAADKAACLLPKLDELRDEGKASSAKQRLKCASLQKFGERAFKAWAVARLSQRFPKAEFAEVSKLVTDLTKVHTECCHGDLLECADDRADLAKYICENQDSISSKLKECCEKPLLEKSHCIAEVENDEMPADLPSLAADFVESKDVCKNYAEAKDVFLGMFLYEYARRHPDYSVVLLLRLAKTYETTLEKCCAAADPHECYAKVFDEFKPLVEEPQNLIKQNCELFEQLGEYKFQNALLVRYTKKVPQVSTPTLVEVSRNLGKVGSKCCKHPEAKRMPCAEDYLSVVLNQLCVLHEKTPVSDRVTKCCTESLVNRRPCFSALEVDETYVPKEFNAETFTFHADICTLSEKERQIKKQTALVELVKHKPKATKEQLKAVMDDFAAFVEKCCKADDKETCFAEEGKKLVAASQAALGL

SEQ ID NO: 181 - protein, 1002 aa, Artificial Sequence
  hCPN1 variant
VTFRHHRYDDLVRTLYKVQNECPGITRVYSIGRSVEGRHLYVLEFSDHPGIHEPLEPEVKYVGNMHGNEALGRELMLQLSEFLCEEFRNRNQRIVQLIQDTRIHILPSMNPDGYEVAAAQGPNKPGYLVGRNNANGVDLNRNFPDLNTYIYYNEKYGGPNHHLPLPDNWKSQVEPETRAVIRWMHSFNFVLSANLHGGAVVANYPYDKSFEHRVRGVRRTASTPTPDDKLFQKLAKVYSYAHGWMFQGWNCGDYFPDGITNGASWYSLSKGMQDFNYLHTNCFEITLELSCLVFLPEEELQREWLGNKEALIQFLEQVHQGIKGMVLDQNYNNLANAVISVSGINHDVTSGDHGDYFRLLLPGIYTVSATAPGYDPETVTVTVGPAEPTLVNFHLKRSENLYFQGGSSGGSSGGSSGDAHKSEVAHRFKDLGEENFKALVLIAFAQYLQQCPFEDHVKLVNEVTEFAKTCVADESAENCDKSLHTLFGDKLCTVATLRETYGEMADCCAKQEPERNECFLQHKDDNPNLPRLVRPEVDVMCTAFHDNEETFLKKYLYEIARRHPYFYAPELLFFAKRYKAAFTECCQAADKAACLLPKLDELRDEGKASSAKQRLKCASLQKFGERAFKAWAVARLSQRFPKAEFAEVSKLVTDLTKVHTECCHGDLLECADDRADLAKYICENQDSISSKLKECCEKPLLEKSHCIAEVENDEMPADLPSLAADFVESKDVCKNYAEAKDVFLGMFLYEYARRHPDYSVVLLLRLAKTYETTLEKCCAAADPHECYAKVFDEFKPLVEEPQNLIKQNCELFEQLGEYKFQNALLVRYTKKVPQVSTPTLVEVSRNLGKVGSKCCKHPEAKRMPCAEDYLSVVLNQLCVLHEKTPVSDRVTKCCTESLVNRRPCFSALEVDETYVPKEFNAETFTFHADICTLSEKERQIKKQTALVELVKHKPKATKEQLKAVMDDFAAFVEKCCKADDKETCFAEEGKKLVAASQAALGL

SEQ ID NO: 182 - protein, 1002 aa, Artificial Sequence
  hCPN1 variant
VTFRHHRYDDLVRTLYKVQNECPGITRVYSIGRSVEGRHLYVLEFSDHPGIHEPLEPEVKYVGNMHGNEALGRELMLQLSEFLCEEFRNRNQRIVQLIQDTRIHILPSMNPDGYEVAAAQGPNKPGYLVGRNNANGVDLNRNFPDLNTYIYYNEKYGGPNHHLPLPDNWKSQVEPETRAVIRWMHSFNFVLSANLHGGAVVANYPYDKSFEHRVRGVRRTASTPTPDDKLFQKLAKVYSYAHGWMFQGWNCGDYFPDGITNGASWYSLSKGMQDFNYLHTNCFEITLELSCLVFPPEDELQREWLGNKEALIQFLEQVHQGIKGMVLDQNYNNLANAVISVSGINHDVTSGDHGDYFRLLLPGIYTVSATAPGYDPETVTVTVGPAEPTLVNFHLKRSENLYFQGGSSGGSSGGSSGDAHKSEVAHRFKDLGEENFKALVLIAFAQYLQQCPFEDHVKLVNEVTEFAKTCVADESAENCDKSLHTLFGDKLCTVATLRETYGEMADCCAKQEPERNECFLQHKDDNPNLPRLVRPEVDVMCTAFHDNEETFLKKYLYEIARRHPYFYAPELLFFAKRYKAAFTECCQAADKAACLLPKLDELRDEGKASSAKQRLKCASLQKFGERAFKAWAVARLSQRFPKAEFAEVSKLVTDLTKVHTECCHGDLLECADDRADLAKYICENQDSISSKLKECCEKPLLEKSHCIAEVENDEMPADLPSLAADFVESKDVCKNYAEAKDVFLGMFLYEYARRHPDYSVVLLLRLAKTYETTLEKCCAAADPHECYAKVFDEFKPLVEEPQNLIKQNCELFEQLGEYKFQNALLVRYTKKVPQVSTPTLVEVSRNLGKVGSKCCKHPEAKRMPCAEDYLSVVLNQLCVLHEKTPVSDRVTKCCTESLVNRRPCFSALEVDETYVPKEFNAETFTFHADICTLSEKERQIKKQTALVELVKHKPKATKEQLKAVMDDFAAFVEKCCKADDKETCFAEEGKKLVAASQAALGL

SEQ ID NO: 183 - protein, 1002 aa, Artificial Sequence
  hCPN1 variant
VTFRHHRYDDLVRTLYKVQNECPGITRVYSIGRSVEGRHLYVLEFSDHPGIHEPLEPEVKYVGNMHGNEALGRELMLQLSEFLCEEFRNRNQRIVQLIQDTRIHILPSMNPDGYEVAAAQGPNKPGYLVGRNNANGVDLNRNFPDLNTYIYYNEKYGGPNHHLPLPDNWKSQVEPETRAVIRWMHSFNFVLSANLHGGAVVANYPYDKSFEHRVRGVRRTASTPTPDDKLFQKLAKVYSYAHGWMFQGWNCGDYFPDGITNGASWYSLSKGMQDFNYLHTNCFEITLELSCDNFPPEEELQREWLGNKEALIQFLEQVHQGIKGMVLDQNYNNLANAVISVSGINHDVTSGDHGDYFRLLLPGIYTVSATAPGYDPETVTVTVGPAEPTLVNFHLKRSENLYFQGGSSGGSSGGSSGDAHKSEVAHRFKDLGEENFKALVLIAFAQYLQQCPFEDHVKLVNEVTEFAKTCVADESAENCDKSLHTLFGDKLCTVATLRETYGEMADCCAKQEPERNECFLQHKDDNPNLPRLVRPEVDVMCTAFHDNEETFLKKYLYEIARRHPYFYAPELLFFAKRYKAAFTECCQAADKAACLLPKLDELRDEGKASSAKQRLKCASLQKFGERAFKAWAVARLSQRFPKAEFAEVSKLVTDLTKVHTECCHGDLLECADDRADLAKYICENQDSISSKLKECCEKPLLEKSHCIAEVENDEMPADLPSLAADFVESKDVCKNYAEAKDVFLGMFLYEYARRHPDYSVVLLLRLAKTYETTLEKCCAAADPHECYAKVFDEFKPLVEEPQNLIKQNCELFEQLGEYKFQNALLVRYTKKVPQVSTPTLVEVSRNLGKVGSKCCKHPEAKRMPCAEDYLSVVLNQLCVLHEKTPVSDRVTKCCTESLVNRRPCFSALEVDETYVPKEFNAETFTFHADICTLSEKERQIKKQTALVELVKHKPKATKEQLKAVMDDFAAFVEKCCKADDKETCFAEEGKKLVAASQAALGL

SEQ ID NO: 184 - protein, 1002 aa, Artificial Sequence
  hCPN1 variant
VTFRHHRYDDLVRTLYKVQNECPGITRVYSIGRSVEGRHLYVLEFSDHPGIHEPLEPEVKYVGNMHGNEALGRELMLQLSEFLCEEFRNRNQRIVQLIQDTRIHILPSMNPDGYEVAAAQGPNKPGYLVGRNNANGVDLNRNFPDLNTYIYYNEKYGGPNHHLPLPDNWKSQVEPETRAVIRWMHSFNFVLSANLHGGAVVANYPYDKSFEHRVRGVRRTASTPTPDDKLFQKLAKVYSYAHGWMFQGWNCGDYFPDGITNGASWYSLSKGMQDFNYLHTNCFEITLELSCDLWPPELELQREWLGNKEALIQFLEQVHQGIKGMVLDQNYNNLANAVISVSGINHDVTSGDHGDYFRLLLPGIYTVSATAPGYDPETVTVTVGPAEPTLVNFHLKRSENLYFQGGSSGGSSGGSSGDAHKSEVAHRFKDLGEENFKALVLIAFAQYLQQCPFEDHVKLVNEVTEFAKTCVADESAENCDKSLHTLFGDKLCTVATLRETYGEMADCCAKQEPERNECFLQHKDDNPNLPRLVRPEVDVMCTAFHDNEETFLKKYLYEIARRHPYFYAPELLFFAKRYKAAFTECCQAADKAACLLPKLDELRDEGKASSAKQRLKCASLQKFGERAFKAWAVARLSQRFPKAEFAEVSKLVTDLTKVHTECCHGDLLECADDRADLAKYICENQDSISSKLKECCEKPLLEKSHCIAEVENDEMPADLPSLAADFVESKDVCKNYAEAKDVFLGMFLYEYARRHPDYSVVLLLRLAKTYETTLEKCCAAADPHECYAKVFDEFKPLVEEPQNLIKQNCELFEQLGEYKFQNALLVRYTKKVPQVSTPTLVEVSRNLGKVGSKCCKHPEAKRMPCAEDYLSVVLNQLCVLHEKTPVSDRVTKCCTESLVNRRPCFSALEVDETYVPKEFNAETFTFHADICTLSEKERQIKKQTALVELVKHKPKATKEQLKAVMDDFAAFVEKCCKADDKETCFAEEGKKLVAASQAALGL

SEQ ID NO: 185 - protein, 1002 aa, Artificial Sequence
  hCPN1 variant
VTFRHHRYDDLVRTLYKVQNECPGITRVYSIGRSVEGRHLYVLEFSDHPGIHEPLEPEVKYVGNMHGNEALGRELMLQLSEFLCEEFRNRNQRIVQLIQDTRIHILPSMNPDGYEVAAAQGPNKPGYLVGRNNANGVDLNRNFPDLNTYIYYNEKYGGPNHHLPLPDNWKSQVEPETRAVIRWMHSFNFVLSANLHGGAVVANYPYDKSFEHRVRGVRRTASTPTPDDKLFQKLAKVYSYAHGWMFQGWNCGDYFPDGITNGASWYSLSKGMQDFNYLHTNCFEITLELSCNLWPPEEELQREWLGNKEALIQFLEQVHQGIKGMVLDQNYNNLANAVISVSGINHDVTSGDHGDYFRLLLPGIYTVSATAPGYDPETVTVTVGPAEPTLVNFHLKRSENLYFQGGSSGGSSGGSSGDAHKSEVAHRFKDLGEENFKALVLIAFAQYLQQCPFEDHVKLVNEVTEFAKTCVADESAENCDKSLHTLFGDKLCTVATLRETYGEMADCCAKQEPERNECFLQHKDDNPNLPRLVRPEVDVMCTAFHDNEETFLKKYLYEIARRHPYFYAPELLFFAKRYKAAFTECCQAADKAACLLPKLDELRDEGKASSAKQRLKCASLQKFGERAFKAWAVARLSQRFPKAEFAEVSKLVTDLTKVHTECCHGDLLECADDRADLAKYICENQDSISSKLKECCEKPLLEKSHCIAEVENDEMPADLPSLAADFVESKDVCKNYAEAKDVFLGMFLYEYARRHPDYSVVLLLRLAKTYETTLEKCCAAADPHECYAKVFDEFKPLVEEPQNLIKQNCELFEQLGEYKFQNALLVRYTKKVPQVSTPTLVEVSRNLGKVGSKCCKHPEAKRMPCAEDYLSVVLNQLCVLHEKTPVSDRVTKCCTESLVNRRPCFSALEVDETYVPKEFNAETFTFHADICTLSEKERQIKKQTALVELVKHKPKATKEQLKAVMDDFAAFVEKCCKADDKETCFAEEGKKLVAASQAALGL

SEQ ID NO: 186 - protein, 1002 aa, Artificial Sequence
  hCPN1 variant
VTFRHHRYDDLVRTLYKVQNECPGITRVYSIGRSVEGRHLYVLEFSDHPGIHEPLEPEVKYVGNMHGNEALGRELMLQLSEFLCEEFRNRNQRIVQLIQDTRIHILPSMNPDGYEVAAAQGPWRAGDLVGRNNANGVDLNRNFPDLNTYIYYNEKYGGPNHHLPLPDNWKSQVEPETRAVIRWMHSFNFVLSANLHGGAVVANYPYDKSFEHRVRGVRRTASTPTPDDKLFQKLAKVYSYAHGWMFQGWNCGDYFPDGITNGASWYSLSKGMQDFNYLHTNCFEITLELSCIIQPPEEELQREWLGNKEALIQFLEQVHQGIKGMVLDQNYNNLANAVISVSGINHDVTSGDHGDYFRLLLPGIYTVSATAPGYDPETVTVTVGPAEPTLVNFHLKRSENLYFQGGSSGGSSGGSSGDAHKSEVAHRFKDLGEENFKALVLIAFAQYLQQCPFEDHVKLVNEVTEFAKTCVADESAENCDKSLHTLFGDKLCTVATLRETYGEMADCCAKQEPERNECFLQHKDDNPNLPRLVRPEVDVMCTAFHDNEETFLKKYLYEIARRHPYFYAPELLFFAKRYKAAFTECCQAADKAACLLPKLDELRDEGKASSAKQRLKCASLQKFGERAFKAWAVARLSQRFPKAEFAEVSKLVTDLTKVHTECCHGDLLECADDRADLAKYICENQDSISSKLKECCEKPLLEKSHCIAEVENDEMPADLPSLAADFVESKDVCKNYAEAKDVFLGMFLYEYARRHPDYSVVLLLRLAKTYETTLEKCCAAADPHECYAKVFDEFKPLVEEPQNLIKQNCELFEQLGEYKFQNALLVRYTKKVPQVSTPTLVEVSRNLGKVGSKCCKHPEAKRMPCAEDYLSVVLNQLCVLHEKTPVSDRVTKCCTESLVNRRPCFSALEVDETYVPKEFNAETFTFHADICTLSEKERQIKKQTALVELVKHKPKATKEQLKAVMDDFAAFVEKCCKADDKETCFAEEGKKLVAASQAALGL

SEQ ID NO: 187 - protein, 1002 aa, Artificial Sequence
  hCPN1 variant
VTFRHHRYDDLVRTLYKVQNECPGITRVYSIGRSVEGRHLYVLEFSDHPGIHEPLEPEVKYVGNMHGNEALGRELMLQLSEFLCEEFRNRNQRIVQLIQDTRIHILPSMNPDGYEVAAAQGPYRPGELVGRNNANGVDLNRNFPDLNTYIYYNEKYGGPNHHLPLPDNWKSQVEPETRAVIRWMHSFNFVLSANLHGGAVVANYPYDKSFEHRVRGVRRTASTPTPDDKLFQKLAKVYSYAHGWMFQGWNCGDYFPDGITNGASWYSLSKGMQDFNYLHTNCFEITLELSCIVMPPEEELQREWLGNKEALIQFLEQVHQGIKGMVLDQNYNNLANAVISVSGINHDVTSGDHGDYFRLLLPGIYTVSATAPGYDPETVTVTVGPAEPTLVNFHLKRSENLYFQGGSSGGSSGGSSGDAHKSEVAHRFKDLGEENFKALVLIAFAQYLQQCPFEDHVKLVNEVTEFAKTCVADESAENCDKSLHTLFGDKLCTVATLRETYGEMADCCAKQEPERNECFLQHKDDNPNLPRLVRPEVDVMCTAFHDNEETFLKKYLYEIARRHPYFYAPELLFFAKRYKAAFTECCQAADKAACLLPKLDELRDEGKASSAKQRLKCASLQKFGERAFKAWAVARLSQRFPKAEFAEVSKLVTDLTKVHTECCHGDLLECADDRADLAKYICENQDSISSKLKECCEKPLLEKSHCIAEVENDEMPADLPSLAADFVESKDVCKNYAEAKDVFLGMFLYEYARRHPDYSVVLLLRLAKTYETTLEKCCAAADPHECYAKVFDEFKPLVEEPQNLIKQNCELFEQLGEYKFQNALLVRYTKKVPQVSTPTLVEVSRNLGKVGSKCCKHPEAKRMPCAEDYLSVVLNQLCVLHEKTPVSDRVTKCCTESLVNRRPCFSALEVDETYVPKEFNAETFTFHADICTLSEKERQIKKQTALVELVKHKPKATKEQLKAVMDDFAAFVEKCCKADDKETCFAEEGKKLVAASQAALGL

SEQ ID NO: 188 - protein, 1002 aa, Artificial Sequence
  hCPN1 variant
VTFRHHRYDDLVRTLYKVQNECPGITRVYSIGRSVEGRHLYVLEFSDHPGIHEPLEPEVKYVGNMHGNEALGRELMLQLSEFLCEEFRNRNQRIVQLIQDTRIHILPSMNPDGYEVAAAQTYNQDGWLVGRNNANGVDLNRNFPDLNTYIYYNEKYGGPNHHLPLPDNWKSQVEPETRAVIRWMHSFNFVLSANLHGGAVVANYPYDKSFEHRVRGVRRTASTPTPDDKLFQKLAKVYSYAHGWMFQGWNCGDYFPDGITNGASWYSLSKGMQDFNYLHTNCFEITLELSCILFPPPEELQREWLGNKEALIQFLEQVHQGIKGMVLDQNYNNLANAVISVSGINHDVTSGDHGDYFRLLLPGIYTVSATAPGYDPETVTVTVGPAEPTLVNFHLKRSENLYFQGGSSGGSSGGSSGDAHKSEVAHRFKDLGEENFKALVLIAFAQYLQQCPFEDHVKLVNEVTEFAKTCVADESAENCDKSLHTLFGDKLCTVATLRETYGEMADCCAKQEPERNECFLQHKDDNPNLPRLVRPEVDVMCTAFHDNEETFLKKYLYEIARRHPYFYAPELLFFAKRYKAAFTECCQAADKAACLLPKLDELRDEGKASSAKQRLKCASLQKFGERAFKAWAVARLSQRFPKAEFAEVSKLVTDLTKVHTECCHGDLLECADDRADLAKYICENQDSISSKLKECCEKPLLEKSHCIAEVENDEMPADLPSLAADFVESKDVCKNYAEAKDVFLGMFLYEYARRHPDYSVVLLLRLAKTYETTLEKCCAAADPHECYAKVFDEFKPLVEEPQNLIKQNCELFEQLGEYKFQNALLVRYTKKVPQVSTPTLVEVSRNLGKVGSKCCKHPEAKRMPCAEDYLSVVLNQLCVLHEKTPVSDRVTKCCTESLVNRRPCFSALEVDETYVPKEFNAETFTFHADICTLSEKERQIKKQTALVELVKHKPKATKEQLKAVMDDFAAFVEKCCKADDKETCFAEEGKKLVAASQAALGL

SEQ ID NO: 189 - protein, 1002 aa, Artificial Sequence
  hCPN1 variant
VTFRHHRYDDLVRTLYKVQNECPGITRVYSIGRSVEGRHLYVLEFSDHPGIHEPLEPEVKYVGNMHGNEALGRELMLQLSEFLCEEFRNRNQRIVQLIQDTRIHILPSMNPDGYEVAAAQGPYRPGDLVGRNNANGVDLNRNFPDLNTYIYYNEKYGGPNHHLPLPDNWKSQVEPETRAVIRWMHSFNFVLSANLHGGAVVANYPYDKSFEHRVRGVRRTASTPTPDDKLFQKLAKVYSYAHGWMFQGWNCGDYFPDGITNGASWYSLSKGMQDFNYLHTNCFEITLELSCDIFPPEEELQREWLGNKEALIQFLEQVHQGIKGMVLDQNYNNLANAVISVSGINHDVTSGDHGDYFRLLLPGIYTVSATAPGYDPETVTVTVGPAEPTLVNFHLKRSENLYFQGGSSGGSSGGSSGDAHKSEVAHRFKDLGEENFKALVLIAFAQYLQQCPFEDHVKLVNEVTEFAKTCVADESAENCDKSLHTLFGDKLCTVATLRETYGEMADCCAKQEPERNECFLQHKDDNPNLPRLVRPEVDVMCTAFHDNEETFLKKYLYEIARRHPYFYAPELLFFAKRYKAAFTECCQAADKAACLLPKLDELRDEGKASSAKQRLKCASLQKFGERAFKAWAVARLSQRFPKAEFAEVSKLVTDLTKVHTECCHGDLLECADDRADLAKYICENQDSISSKLKECCEKPLLEKSHCIAEVENDEMPADLPSLAADFVESKDVCKNYAEAKDVFLGMFLYEYARRHPDYSVVLLLRLAKTYETTLEKCCAAADPHECYAKVFDEFKPLVEEPQNLIKQNCELFEQLGEYKFQNALLVRYTKKVPQVSTPTLVEVSRNLGKVGSKCCKHPEAKRMPCAEDYLSVVLNQLCVLHEKTPVSDRVTKCCTESLVNRRPCFSALEVDETYVPKEFNAETFTFHADICTLSEKERQIKKQTALVELVKHKPKATKEQLKAVMDDFAAFVEKCCKADDKETCFAEEGKKLVAASQAALGL

SEQ ID NO: 190 - protein, 1002 aa, Artificial Sequence
  hCPN1 variant
VTFRHHRYDDLVRTLYKVQNECPGITRVYSIGRSVEGRHLYVLEFSDHPGIHEPLEPEVKYVGNMHGNEALGRELMLQLSEFLCEEFRNRNQRIVQLIQDTRIHILPSMNPDGYEVAAAQDSTIPGYLVGRNNANGVDLNRNFPDLNTYIYYNEKYGGPNHHLPLPDNWKSQVEPETRAVIRWMHSFNFVLSANLHGGAVVANYPYDKSFEHRVRGVRRTASTPTPDDKLFQKLAKVYSYAHGWMFQGWNCGDYFPDGITNGASWYSLSKGMQDFNYLHTNCFEITLELSCNAFPPESELQREWLGNKEALIQFLEQVHQGIKGMVLDQNYNNLANAVISVSGINHDVTSGDHGDYFRLLLPGIYTVSATAPGYDPETVTVTVGPAEPTLVNFHLKRSENLYFQGGSSGGSSGGSSGDAHKSEVAHRFKDLGEENFKALVLIAFAQYLQQCPFEDHVKLVNEVTEFAKTCVADESAENCDKSLHTLFGDKLCTVATLRETYGEMADCCAKQEPERNECFLQHKDDNPNLPRLVRPEVDVMCTAFHDNEETFLKKYLYEIARRHPYFYAPELLFFAKRYKAAFTECCQAADKAACLLPKLDELRDEGKASSAKQRLKCASLQKFGERAFKAWAVARLSQRFPKAEFAEVSKLVTDLTKVHTECCHGDLLECADDRADLAKYICENQDSISSKLKECCEKPLLEKSHCIAEVENDEMPADLPSLAADFVESKDVCKNYAEAKDVFLGMFLYEYARRHPDYSVVLLLRLAKTYETTLEKCCAAADPHECYAKVFDEFKPLVEEPQNLIKQNCELFEQLGEYKFQNALLVRYTKKVPQVSTPTLVEVSRNLGKVGSKCCKHPEAKRMPCAEDYLSVVLNQLCVLHEKTPVSDRVTKCCTESLVNRRPCFSALEVDETYVPKEFNAETFTFHADICTLSEKERQIKKQTALVELVKHKPKATKEQLKAVMDDFAAFVEKCCKADDKETCFAEEGKKLVAASQAALGL

SEQ ID NO: 191 - protein, 1002 aa, Artificial Sequence
  hCPN1 variant
VTFRHHRYDDLVRTLYKVQNECPGITRVYSIGRSVEGRHLYVLEFSDHPGIHEPLEPEVKYVGNMHGNEALGRELMLQLSEFLCEEFRNRNQRIVQLIQDTRIHILPSMNPDGYEVAAAQQWDKPGILVGRNNANGVDLNRNFPDLNTYIYYNEKYGGPNHHLPLPDNWKSQVEPETRAVIRWMHSFNFVLSANLHGGAVVANYPYDKSFEHRVRGVRRTASTPTPDDKLFQKLAKVYSYAHGWMFQGWNCGDYFPDGITNGASWYSLSKGMQDFNYLHTNCFEITLELSCLAIPPEEELQREWLGNKEALIQFLEQVHQGIKGMVLDQNYNNLANAVISVSGINHDVTSGDHGDYFRLLLPGIYTVSATAPGYDPETVTVTVGPAEPTLVNFHLKRSENLYFQGGSSGGSSGGSSGDAHKSEVAHRFKDLGEENFKALVLIAFAQYLQQCPFEDHVKLVNEVTEFAKTCVADESAENCDKSLHTLFGDKLCTVATLRETYGEMADCCAKQEPERNECFLQHKDDNPNLPRLVRPEVDVMCTAFHDNEETFLKKYLYEIARRHPYFYAPELLFFAKRYKAAFTECCQAADKAACLLPKLDELRDEGKASSAKQRLKCASLQKFGERAFKAWAVARLSQRFPKAEFAEVSKLVTDLTKVHTECCHGDLLECADDRADLAKYICENQDSISSKLKECCEKPLLEKSHCIAEVENDEMPADLPSLAADFVESKDVCKNYAEAKDVFLGMFLYEYARRHPDYSVVLLLRLAKTYETTLEKCCAAADPHECYAKVFDEFKPLVEEPQNLIKQNCELFEQLGEYKFQNALLVRYTKKVPQVSTPTLVEVSRNLGKVGSKCCKHPEAKRMPCAEDYLSVVLNQLCVLHEKTPVSDRVTKCCTESLVNRRPCFSALEVDETYVPKEFNAETFTFHADICTLSEKERQIKKQTALVELVKHKPKATKEQLKAVMDDFAAFVEKCCKADDKETCFAEEGKKLVAASQAALGL

SEQ ID NO: 192 - protein, 1002 aa, Artificial Sequence
  hCPN1 variant
VTFRHHRYDDLVRTLYKVQNECPGITRVYSIGRSVEGRHLYVLEFSDHPGIHEPLEPEVKYVGNMHGNEALGRELMLQLSEFLCEEFRNRNQRIVQLIQDTRIHILPSMNPDGYEVAAAQDWDKPGILVGRNNANGVDLNRNFPDLNTYIYYNEKYGGPNHHLPLPDNWKSQVEPETRAVIRWMHSFNFVLSANLHGGAVVANYPYDKSFEHRVRGVRRTASTPTPDDKLFQKLAKVYSYAHGWMFQGWNCGDYFPDGITNGASWYSLSKGMQDFNYLHTNCFEITLELSCIAWPPEEELQREWLGNKEALIQFLEQVHQGIKGMVLDQNYNNLANAVISVSGINHDVTSGDHGDYFRLLLPGIYTVSATAPGYDPETVTVTVGPAEPTLVNFHLKRSENLYFQGGSSGGSSGGSSGDAHKSEVAHRFKDLGEENFKALVLIAFAQYLQQCPFEDHVKLVNEVTEFAKTCVADESAENCDKSLHTLFGDKLCTVATLRETYGEMADCCAKQEPERNECFLQHKDDNPNLPRLVRPEVDVMCTAFHDNEETFLKKYLYEIARRHPYFYAPELLFFAKRYKAAFTECCQAADKAACLLPKLDELRDEGKASSAKQRLKCASLQKFGERAFKAWAVARLSQRFPKAEFAEVSKLVTDLTKVHTECCHGDLLECADDRADLAKYICENQDSISSKLKECCEKPLLEKSHCIAEVENDEMPADLPSLAADFVESKDVCKNYAEAKDVFLGMFLYEYARRHPDYSVVLLLRLAKTYETTLEKCCAAADPHECYAKVFDEFKPLVEEPQNLIKQNCELFEQLGEYKFQNALLVRYTKKVPQVSTPTLVEVSRNLGKVGSKCCKHPEAKRMPCAEDYLSVVLNQLCVLHEKTPVSDRVTKCCTESLVNRRPCFSALEVDETYVPKEFNAETFTFHADICTLSEKERQIKKQTALVELVKHKPKATKEQLKAVMDDFAAFVEKCCKADDKETCFAEEGKKLVAASQAALGL

SEQ ID NO: 193 - protein, 1002 aa, Artificial Sequence
  hCPN1 variant
VTFRHHRYDDLVRTLYKVQNECPGITRVYSIGRSVEGRHLYVLEFSDHPGIHEPLEPEVKYVGNMHGNEALGRELMLQLSEFLCEEFRNRNQRIVQLIQDTRIHILPSMNPDGYEVAAAQGWRHPGSLVGRNNANGVDLNRNFPDLNTYIYYNEKYGGPNHHLPLPDNWKSQVEPETRAVIRWMHSFNFVLSANLHGGAVVANYPYDKSFEHRVRGVRRTASTPTPDDKLFQKLAKVYSYAHGWMFQGWNCGDYFPDGITNGASWYSLSKGMQDFNYLHTNCFEITLELSCLVFPPEWELQREWLGNKEALIQFLEQVHQGIKGMVLDQNYNNLANAVISVSGINHDVTSGDHGDYFRLLLPGIYTVSATAPGYDPETVTVTVGPAEPTLVNFHLKRSENLYFQGGSSGGSSGGSSGDAHKSEVAHRFKDLGEENFKALVLIAFAQYLQQCPFEDHVKLVNEVTEFAKTCVADESAENCDKSLHTLFGDKLCTVATLRETYGEMADCCAKQEPERNECFLQHKDDNPNLPRLVRPEVDVMCTAFHDNEETFLKKYLYEIARRHPYFYAPELLFFAKRYKAAFTECCQAADKAACLLPKLDELRDEGKASSAKQRLKCASLQKFGERAFKAWAVARLSQRFPKAEFAEVSKLVTDLTKVHTECCHGDLLECADDRADLAKYICENQDSISSKLKECCEKPLLEKSHCIAEVENDEMPADLPSLAADFVESKDVCKNYAEAKDVFLGMFLYEYARRHPDYSVVLLLRLAKTYETTLEKCCAAADPHECYAKVFDEFKPLVEEPQNLIKQNCELFEQLGEYKFQNALLVRYTKKVPQVSTPTLVEVSRNLGKVGSKCCKHPEAKRMPCAEDYLSVVLNQLCVLHEKTPVSDRVTKCCTESLVNRRPCFSALEVDETYVPKEFNAETFTFHADICTLSEKERQIKKQTALVELVKHKPKATKEQLKAVMDDFAAFVEKCCKADDKETCFAEEGKKLVAASQAALGL

SEQ ID NO: 194 - protein, 1002 aa, Artificial Sequence
  hCPN1 variant
VTFRHHRYDDLVRTLYKVQNECPGITRVYSIGRSVEGRHLYVLEFSDHPGIHEPLEPEVKYVGNMHGNEALGRELMLQLSEFLCEEFRNRNQRIVQLIQDTRIHILPSMNPDGYEVAAAQGWRYPGYLVGRNNANGVDLNRNFPDLNTYIYYNEKYGGPNHHLPLPDNWKSQVEPETRAVIRWMHSFNFVLSANLHGGAVVANYPYDKSFEHRVRGVRRTASTPTPDDKLFQKLAKVYSYAHGWMFQGWNCGDYFPDGITNGASWYSLSKGMQDFNYLHTNCFEITLELSCLVFPPEDELQREWLGNKEALIQFLEQVHQGIKGMVLDQNYNNLANAVISVSGINHDVTSGDHGDYFRLLLPGIYTVSATAPGYDPETVTVTVGPAEPTLVNFHLKRSENLYFQGGSSGGSSGGSSGDAHKSEVAHRFKDLGEENFKALVLIAFAQYLQQCPFEDHVKLVNEVTEFAKTCVADESAENCDKSLHTLFGDKLCTVATLRETYGEMADCCAKQEPERNECFLQHKDDNPNLPRLVRPEVDVMCTAFHDNEETFLKKYLYEIARRHPYFYAPELLFFAKRYKAAFTECCQAADKAACLLPKLDELRDEGKASSAKQRLKCASLQKFGERAFKAWAVARLSQRFPKAEFAEVSKLVTDLTKVHTECCHGDLLECADDRADLAKYICENQDSISSKLKECCEKPLLEKSHCIAEVENDEMPADLPSLAADFVESKDVCKNYAEAKDVFLGMFLYEYARRHPDYSVVLLLRLAKTYETTLEKCCAAADPHECYAKVFDEFKPLVEEPQNLIKQNCELFEQLGEYKFQNALLVRYTKKVPQVSTPTLVEVSRNLGKVGSKCCKHPEAKRMPCAEDYLSVVLNQLCVLHEKTPVSDRVTKCCTESLVNRRPCFSALEVDETYVPKEFNAETFTFHADICTLSEKERQIKKQTALVELVKHKPKATKEQLKAVMDDFAAFVEKCCKADDKETCFAEEGKKLVAASQAALGL

SEQ ID NO: 195 - protein, 1002 aa, Artificial Sequence
  hCPN1 variant
VTFRHHRYDDLVRTLYKVQNECPGITRVYSIGRSVEGRHLYVLEFSDHPGIHEPLEPEVKYVGNMHGNEALGRELMLQLSEFLCEEFRNRNQRIVQLIQDTRIHILPSMNPDGYEVAAAQGPNQPGYLVGRNNANGVDLNRNFPDLNTYIYYNEKYGGPNHHLPLPDNWKSQVEPETRAVIRWMHSFNFVLSANLHGGAVVANYPYDKSFEHRVRGVRRTASTPTPDDKLFQKLAKVYSYAHGWMFQGWNCGDYFPDGITNGASWYSLSKGMQDFNYLHTNCFEITLELSCDLWPPELELQREWLGNKEALIQFLEQVHQGIKGMVLDQNYNNLANAVISVSGINHDVTSGDHGDYFRLLLPGIYTVSATAPGYDPETVTVTVGPAEPTLVNFHLKRSENLYFQGGSSGGSSGGSSGDAHKSEVAHRFKDLGEENFKALVLIAFAQYLQQCPFEDHVKLVNEVTEFAKTCVADESAENCDKSLHTLFGDKLCTVATLRETYGEMADCCAKQEPERNECFLQHKDDNPNLPRLVRPEVDVMCTAFHDNEETFLKKYLYEIARRHPYFYAPELLFFAKRYKAAFTECCQAADKAACLLPKLDELRDEGKASSAKQRLKCASLQKFGERAFKAWAVARLSQRFPKAEFAEVSKLVTDLTKVHTECCHGDLLECADDRADLAKYICENQDSISSKLKECCEKPLLEKSHCIAEVENDEMPADLPSLAADFVESKDVCKNYAEAKDVFLGMFLYEYARRHPDYSVVLLLRLAKTYETTLEKCCAAADPHECYAKVFDEFKPLVEEPQNLIKQNCELFEQLGEYKFQNALLVRYTKKVPQVSTPTLVEVSRNLGKVGSKCCKHPEAKRMPCAEDYLSVVLNQLCVLHEKTPVSDRVTKCCTESLVNRRPCFSALEVDETYVPKEFNAETFTFHADICTLSEKERQIKKQTALVELVKHKPKATKEQLKAVMDDFAAFVEKCCKADDKETCFAEEGKKLVAASQAALGL

SEQ ID NO: 196 - protein, 1002 aa, Artificial Sequence
  hCPN1 variant
VTFRHHRYDDLVRTLYKVQNECPGITRVYSIGRSVEGRHLYVLEFSDHPGIHEPLEPEVKYVGNMHGNEALGRELMLQLSEFLCEEFRNRNQRIVQLIQDTRIHILPSMNPDGYEVAAAQGPNDPGYLVGRNNANGVDLNRNFPDLNTYIYYNEKYGGPNHHLPLPDNWKSQVEPETRAVIRWMHSFNFVLSANLHGGAVVANYPYDKSFEHRVRGVRRTASTPTPDDKLFQKLAKVYSYAHGWMFQGWNCGDYFPDGITNGASWYSLSKGMQDFNYLHTNCFEITLELSCDLWPPDEELQREWLGNKEALIQFLEQVHQGIKGMVLDQNYNNLANAVISVSGINHDVTSGDHGDYFRLLLPGIYTVSATAPGYDPETVTVTVGPAEPTLVNFHLKRSENLYFQGGSSGGSSGGSSGDAHKSEVAHRFKDLGEENFKALVLIAFAQYLQQCPFEDHVKLVNEVTEFAKTCVADESAENCDKSLHTLFGDKLCTVATLRETYGEMADCCAKQEPERNECFLQHKDDNPNLPRLVRPEVDVMCTAFHDNEETFLKKYLYEIARRHPYFYAPELLFFAKRYKAAFTECCQAADKAACLLPKLDELRDEGKASSAKQRLKCASLQKFGERAFKAWAVARLSQRFPKAEFAEVSKLVTDLTKVHTECCHGDLLECADDRADLAKYICENQDSISSKLKECCEKPLLEKSHCIAEVENDEMPADLPSLAADFVESKDVCKNYAEAKDVFLGMFLYEYARRHPDYSVVLLLRLAKTYETTLEKCCAAADPHECYAKVFDEFKPLVEEPQNLIKQNCELFEQLGEYKFQNALLVRYTKKVPQVSTPTLVEVSRNLGKVGSKCCKHPEAKRMPCAEDYLSVVLNQLCVLHEKTPVSDRVTKCCTESLVNRRPCFSALEVDETYVPKEFNAETFTFHADICTLSEKERQIKKQTALVELVKHKPKATKEQLKAVMDDFAAFVEKCCKADDKETCFAEEGKKLVAASQAALGL

SEQ ID NO: 197 - protein, 1002 aa, Artificial Sequence
  hCPN1 variant
VTFRHHRYDDLVRTLYKVQNECPGITRVYSIGRSVEGRHLYVLEFSDHPGIHEPLEPEVKYVGNMHGNEALGRELMLQLSEFLCEEFRNRNQRIVQLIQDTRIHILPSMNPDGYEVAAAQGPNKHGYLVGRNNANGVDLNRNFPDLNTYIYYNEKYGGPNHHLPLPDNWKSQVEPETRAVIRWMHSFNFVLSANLHGGAVVANYPYDKSFEHRVRGVRRTASTPTPDDKLFQKLAKVYSYAHGWMFQGWNCGDYFPDGITNGASWYSLSKGMQDFNYLHTNCFEITLELSCDKFPPEEELQREWLGNKEALIQFLEQVHQGIKGMVLDQNYNNLANAVISVSGINHDVTSGDHGDYFRLLLPGIYTVSATAPGYDPETVTVTVGPAEPTLVNFHLKRSENLYFQGGSSGGSSGGSSGDAHKSEVAHRFKDLGEENFKALVLIAFAQYLQQCPFEDHVKLVNEVTEFAKTCVADESAENCDKSLHTLFGDKLCTVATLRETYGEMADCCAKQEPERNECFLQHKDDNPNLPRLVRPEVDVMCTAFHDNEETFLKKYLYEIARRHPYFYAPELLFFAKRYKAAFTECCQAADKAACLLPKLDELRDEGKASSAKQRLKCASLQKFGERAFKAWAVARLSQRFPKAEFAEVSKLVTDLTKVHTECCHGDLLECADDRADLAKYICENQDSISSKLKECCEKPLLEKSHCIAEVENDEMPADLPSLAADFVESKDVCKNYAEAKDVFLGMFLYEYARRHPDYSVVLLLRLAKTYETTLEKCCAAADPHECYAKVFDEFKPLVEEPQNLIKQNCELFEQLGEYKFQNALLVRYTKKVPQVSTPTLVEVSRNLGKVGSKCCKHPEAKRMPCAEDYLSVVLNQLCVLHEKTPVSDRVTKCCTESLVNRRPCFSALEVDETYVPKEFNAETFTFHADICTLSEKERQIKKQTALVELVKHKPKATKEQLKAVMDDFAAFVEKCCKADDKETCFAEEGKKLVAASQAALGL

SEQ ID NO: 198 - protein, 1002 aa, Artificial Sequence
  hCPN1 variant
VTFRHHRYDDLVRTLYKVQNECPGITRVYSIGRSVEGRHLYVLEFSDHPGIHEPLEPEVKYVGNMHGNEALGRELMLQLSEFLCEEFRNRNQRIVQLIQDTRIHILPSMNPDGYEVAAAQGPNKLGYLVGRNNANGVDLNRNFPDLNTYIYYNEKYGGPNHHLPLPDNWKSQVEPETRAVIRWMHSFNFVLSANLHGGAVVANYPYDKSFEHRVRGVRRTASTPTPDDKLFQKLAKVYSYAHGWMFQGWNCGDYFPDGITNGASWYSLSKGMQDFNYLHTNCFEITLELSCDKFPPEEELQREWLGNKEALIQFLEQVHQGIKGMVLDQNYNNLANAVISVSGINHDVTSGDHGDYFRLLLPGIYTVSATAPGYDPETVTVTVGPAEPTLVNFHLKRSENLYFQGGSSGGSSGGSSGDAHKSEVAHRFKDLGEENFKALVLIAFAQYLQQCPFEDHVKLVNEVTEFAKTCVADESAENCDKSLHTLFGDKLCTVATLRETYGEMADCCAKQEPERNECFLQHKDDNPNLPRLVRPEVDVMCTAFHDNEETFLKKYLYEIARRHPYFYAPELLFFAKRYKAAFTECCQAADKAACLLPKLDELRDEGKASSAKQRLKCASLQKFGERAFKAWAVARLSQRFPKAEFAEVSKLVTDLTKVHTECCHGDLLECADDRADLAKYICENQDSISSKLKECCEKPLLEKSHCIAEVENDEMPADLPSLAADFVESKDVCKNYAEAKDVFLGMFLYEYARRHPDYSVVLLLRLAKTYETTLEKCCAAADPHECYAKVFDEFKPLVEEPQNLIKQNCELFEQLGEYKFQNALLVRYTKKVPQVSTPTLVEVSRNLGKVGSKCCKHPEAKRMPCAEDYLSVVLNQLCVLHEKTPVSDRVTKCCTESLVNRRPCFSALEVDETYVPKEFNAETFTFHADICTLSEKERQIKKQTALVELVKHKPKATKEQLKAVMDDFAAFVEKCCKADDKETCFAEEGKKLVAASQAALGL

SEQ ID NO: 199 - protein, 1002 aa, Artificial Sequence
  hCPN1 variant
VTFRHHRYDDLVRTLYKVQNECPGITRVYSIGRSVEGRHLYVLEFSDHPGIHEPLEPEVKYVGNMHGNEALGRELMLQLSEFLCEEFRNRNQRIVQLIQDTRIHILPSMNPDGYEVAAAQGADISGYLVGRNNANGVDLNRNFPDLNTYIYYNEKYGGPNHHLPLPDNWKSQVEPETRAVIRWMHSFNFVLSANLHGGAVVANYPYDKSFEHRVRGVRRTASTPTPDDKLFQKLAKVYSYAHGWMFQGWNCGDYFPDGITNGASWYSLSKGMQDFNYLHTNCFEITLELSCDKFPPEEELQREWLGNKEALIQFLEQVHQGIKGMVLDQNYNNLANAVISVSGINHDVTSGDHGDYFRLLLPGIYTVSATAPGYDPETVTVTVGPAEPTLVNFHLKRSENLYFQGGSSGGSSGGSSGDAHKSEVAHRFKDLGEENFKALVLIAFAQYLQQCPFEDHVKLVNEVTEFAKTCVADESAENCDKSLHTLFGDKLCTVATLRETYGEMADCCAKQEPERNECFLQHKDDNPNLPRLVRPEVDVMCTAFHDNEETFLKKYLYEIARRHPYFYAPELLFFAKRYKAAFTECCQAADKAACLLPKLDELRDEGKASSAKQRLKCASLQKFGERAFKAWAVARLSQRFPKAEFAEVSKLVTDLTKVHTECCHGDLLECADDRADLAKYICENQDSISSKLKECCEKPLLEKSHCIAEVENDEMPADLPSLAADFVESKDVCKNYAEAKDVFLGMFLYEYARRHPDYSVVLLLRLAKTYETTLEKCCAAADPHECYAKVFDEFKPLVEEPQNLIKQNCELFEQLGEYKFQNALLVRYTKKVPQVSTPTLVEVSRNLGKVGSKCCKHPEAKRMPCAEDYLSVVLNQLCVLHEKTPVSDRVTKCCTESLVNRRPCFSALEVDETYVPKEFNAETFTFHADICTLSEKERQIKKQTALVELVKHKPKATKEQLKAVMDDFAAFVEKCCKADDKETCFAEEGKKLVAASQAALGL

SEQ ID NO: 200 - protein, 1002 aa, Artificial Sequence
  hCPN1 variant
VTFRHHRYDDLVRTLYKVQNECPGITRVYSIGRSVEGRHLYVLEFSDHPGIHEPLEPEVKYVGNMHGNEALGRELMLQLSEFLCEEFRNRNQRIVQLIQDTRIHILPSMNPDGYEVAAAQGADSSGYLVGRNNANGVDLNRNFPDLNTYIYYNEKYGGPNHHLPLPDNWKSQVEPETRAVIRWMHSFNFVLSANLHGGAVVANYPYDKSFEHRVRGVRRTASTPTPDDKLFQKLAKVYSYAHGWMFQGWNCGDYFPDGITNGASWYSLSKGMQDFNYLHTNCFEITLELSCDKFPPEEELQREWLGNKEALIQFLEQVHQGIKGMVLDQNYNNLANAVISVSGINHDVTSGDHGDYFRLLLPGIYTVSATAPGYDPETVTVTVGPAEPTLVNFHLKRSENLYFQGGSSGGSSGGSSGDAHKSEVAHRFKDLGEENFKALVLIAFAQYLQQCPFEDHVKLVNEVTEFAKTCVADESAENCDKSLHTLFGDKLCTVATLRETYGEMADCCAKQEPERNECFLQHKDDNPNLPRLVRPEVDVMCTAFHDNEETFLKKYLYEIARRHPYFYAPELLFFAKRYKAAFTECCQAADKAACLLPKLDELRDEGKASSAKQRLKCASLQKFGERAFKAWAVARLSQRFPKAEFAEVSKLVTDLTKVHTECCHGDLLECADDRADLAKYICENQDSISSKLKECCEKPLLEKSHCIAEVENDEMPADLPSLAADFVESKDVCKNYAEAKDVFLGMFLYEYARRHPDYSVVLLLRLAKTYETTLEKCCAAADPHECYAKVFDEFKPLVEEPQNLIKQNCELFEQLGEYKFQNALLVRYTKKVPQVSTPTLVEVSRNLGKVGSKCCKHPEAKRMPCAEDYLSVVLNQLCVLHEKTPVSDRVTKCCTESLVNRRPCFSALEVDETYVPKEFNAETFTFHADICTLSEKERQIKKQTALVELVKHKPKATKEQLKAVMDDFAAFVEKCCKADDKETCFAEEGKKLVAASQAALGL

SEQ ID NO: 201 - protein, 1002 aa, Artificial Sequence
  hCPN1 variant
VTFRHHRYDDLVRTLYKVQNECPGITRVYSIGRSVEGRHLYVLEFSDHPGIHEPLEPEVKYVGNMHGNEALGRELMLQLSEFLCEEFRNRNQRIVQLIQDTRIHILPSMNPDGYEVAAAQERDISGYLVGRNNANGVDLNRNFPDLNTYIYYNEKYGGPNHHLPLPDNWKSQVEPETRAVIRWMHSFNFVLSANLHGGAVVANYPYDKSFEHRVRGVRRTASTPTPDDKLFQKLAKVYSYAHGWMFQGWNCGDYFPDGITNGASWYSLSKGMQDFNYLHTNCFEITLELSCDKFPPEEELQREWLGNKEALIQFLEQVHQGIKGMVLDQNYNNLANAVISVSGINHDVTSGDHGDYFRLLLPGIYTVSATAPGYDPETVTVTVGPAEPTLVNFHLKRSENLYFQGGSSGGSSGGSSGDAHKSEVAHRFKDLGEENFKALVLIAFAQYLQQCPFEDHVKLVNEVTEFAKTCVADESAENCDKSLHTLFGDKLCTVATLRETYGEMADCCAKQEPERNECFLQHKDDNPNLPRLVRPEVDVMCTAFHDNEETFLKKYLYEIARRHPYFYAPELLFFAKRYKAAFTECCQAADKAACLLPKLDELRDEGKASSAKQRLKCASLQKFGERAFKAWAVARLSQRFPKAEFAEVSKLVTDLTKVHTECCHGDLLECADDRADLAKYICENQDSISSKLKECCEKPLLEKSHCIAEVENDEMPADLPSLAADFVESKDVCKNYAEAKDVFLGMFLYEYARRHPDYSVVLLLRLAKTYETTLEKCCAAADPHECYAKVFDEFKPLVEEPQNLIKQNCELFEQLGEYKFQNALLVRYTKKVPQVSTPTLVEVSRNLGKVGSKCCKHPEAKRMPCAEDYLSVVLNQLCVLHEKTPVSDRVTKCCTESLVNRRPCFSALEVDETYVPKEFNAETFTFHADICTLSEKERQIKKQTALVELVKHKPKATKEQLKAVMDDFAAFVEKCCKADDKETCFAEEGKKLVAASQAALGL

SEQ ID NO: 202 - protein, 1002 aa, Artificial Sequence
  hCPN1 variant
VTFRHHRYDDLVRTLYKVQNECPGITRVYSIGRSVEGRHLYVLEFSDHPGIHEPLEPEVKYVGNMHGNEALGRELMLQLSEFLCEEFRNRNQRIVQLIQDTRIHILPSMNPDGYEVAAAQDRDTSQYLVGRNNANGVDLNRNFPDLNTYIYYNEKYGGPNHHLPLPDNWKSQVEPETRAVIRWMHSFNFVLSANLHGGAVVANYPYDKSFEHRVRGVRRTASTPTPDDKLFQKLAKVYSYAHGWMFQGWNCGDYFPDGITNGASWYSLSKGMQDFNYLHTNCFEITLELSCDKFPPEEELQREWLGNKEALIQFLEQVHQGIKGMVLDQNYNNLANAVISVSGINHDVTSGDHGDYFRLLLPGIYTVSATAPGYDPETVTVTVGPAEPTLVNFHLKRSENLYFQGGSSGGSSGGSSGDAHKSEVAHRFKDLGEENFKALVLIAFAQYLQQCPFEDHVKLVNEVTEFAKTCVADESAENCDKSLHTLFGDKLCTVATLRETYGEMADCCAKQEPERNECFLQHKDDNPNLPRLVRPEVDVMCTAFHDNEETFLKKYLYEIARRHPYFYAPELLFFAKRYKAAFTECCQAADKAACLLPKLDELRDEGKASSAKQRLKCASLQKFGERAFKAWAVARLSQRFPKAEFAEVSKLVTDLTKVHTECCHGDLLECADDRADLAKYICENQDSISSKLKECCEKPLLEKSHCIAEVENDEMPADLPSLAADFVESKDVCKNYAEAKDVFLGMFLYEYARRHPDYSVVLLLRLAKTYETTLEKCCAAADPHECYAKVFDEFKPLVEEPQNLIKQNCELFEQLGEYKFQNALLVRYTKKVPQVSTPTLVEVSRNLGKVGSKCCKHPEAKRMPCAEDYLSVVLNQLCVLHEKTPVSDRVTKCCTESLVNRRPCFSALEVDETYVPKEFNAETFTFHADICTLSEKERQIKKQTALVELVKHKPKATKEQLKAVMDDFAAFVEKCCKADDKETCFAEEGKKLVAASQAALGL

SEQ ID NO: 203 - protein, 1002 aa, Artificial Sequence
  hCPN1 variant
VTFRHHRYDDLVRTLYKVQNECPGITRVYSIGRSVEGRHLYVLEFSDHPGIHEPLEPEVKYVGNMHGNEALGRELMLQLSEFLCEEFRNRNQRIVQLIQDTRIHILPSMNPDGYEVAAAQGPDDSQYLVGRNNANGVDLNRNFPDLNTYIYYNEKYGGPNHHLPLPDNWKSQVEPETRAVIRWMHSFNFVLSANLHGGAVVANYPYDKSFEHRVRGVRRTASTPTPDDKLFQKLAKVYSYAHGWMFQGWNCGDYFPDGITNGASWYSLSKGMQDFNYLHTNCFEITLELSCDKFPPEEELQREWLGNKEALIQFLEQVHQGIKGMVLDQNYNNLANAVISVSGINHDVTSGDHGDYFRLLLPGIYTVSATAPGYDPETVTVTVGPAEPTLVNFHLKRSENLYFQGGSSGGSSGGSSGDAHKSEVAHRFKDLGEENFKALVLIAFAQYLQQCPFEDHVKLVNEVTEFAKTCVADESAENCDKSLHTLFGDKLCTVATLRETYGEMADCCAKQEPERNECFLQHKDDNPNLPRLVRPEVDVMCTAFHDNEETFLKKYLYEIARRHPYFYAPELLFFAKRYKAAFTECCQAADKAACLLPKLDELRDEGKASSAKQRLKCASLQKFGERAFKAWAVARLSQRFPKAEFAEVSKLVTDLTKVHTECCHGDLLECADDRADLAKYICENQDSISSKLKECCEKPLLEKSHCIAEVENDEMPADLPSLAADFVESKDVCKNYAEAKDVFLGMFLYEYARRHPDYSVVLLLRLAKTYETTLEKCCAAADPHECYAKVFDEFKPLVEEPQNLIKQNCELFEQLGEYKFQNALLVRYTKKVPQVSTPTLVEVSRNLGKVGSKCCKHPEAKRMPCAEDYLSVVLNQLCVLHEKTPVSDRVTKCCTESLVNRRPCFSALEVDETYVPKEFNAETFTFHADICTLSEKERQIKKQTALVELVKHKPKATKEQLKAVMDDFAAFVEKCCKADDKETCFAEEGKKLVAASQAALGL

SEQ ID NO: 204 - protein, 1002 aa, Artificial Sequence
  hCPN1 variant
VTFRHHRYDDLVRTLYKVQNECPGITRVYSIGRSVEGRHLYVLEFSDHPGIHEPLEPEVKYVGNMHGDEALGRELMLQLSEFLCEEFRNRNQRIVQLIQDTRIHILPSMNPDGYEVAAAQGPNKPGYLVGRNNANGVDLNRNFPDLNTYIYYNEKYGGPNHHLPLPDNWKSQVEPETRAVIRWMHSFNFVLSANLHGGAVVANYPYDKSFEHRVRGVRRTASTPTPDDKLFQKLAKVYSYAHGWMFQGWNCGDYFPDGITNGASWYSLSKGMQDFNYLHTNCFEITLELSCDKFPPEEELQREWLGNKEALIQFLEQVHQGIKGMVLDQNYNNLANAVISVSGINHDVTSGDHGDYFRLLLPGIYTVSATAPGYDPETVTVTVGPAEPTLVNFHLKRSENLYFQGGSSGGSSGGSSGDAHKSEVAHRFKDLGEENFKALVLIAFAQYLQQCPFEDHVKLVNEVTEFAKTCVADESAENCDKSLHTLFGDKLCTVATLRETYGEMADCCAKQEPERNECFLQHKDDNPNLPRLVRPEVDVMCTAFHDNEETFLKKYLYEIARRHPYFYAPELLFFAKRYKAAFTECCQAADKAACLLPKLDELRDEGKASSAKQRLKCASLQKFGERAFKAWAVARLSQRFPKAEFAEVSKLVTDLTKVHTECCHGDLLECADDRADLAKYICENQDSISSKLKECCEKPLLEKSHCIAEVENDEMPADLPSLAADFVESKDVCKNYAEAKDVFLGMFLYEYARRHPDYSVVLLLRLAKTYETTLEKCCAAADPHECYAKVFDEFKPLVEEPQNLIKQNCELFEQLGEYKFQNALLVRYTKKVPQVSTPTLVEVSRNLGKVGSKCCKHPEAKRMPCAEDYLSVVLNQLCVLHEKTPVSDRVTKCCTESLVNRRPCFSALEVDETYVPKEFNAETFTFHADICTLSEKERQIKKQTALVELVKHKPKATKEQLKAVMDDFAAFVEKCCKADDKETCFAEEGKKLVAASQAALGL

SEQ ID NO: 205 - protein, 1002 aa, Artificial Sequence
  hCPN1 variant
VTFRHHRYDDLVRTLYKVQNECPGITRVYSIGRSVEGRHLYVLEFSDHPGIHEPLEPEVKYVGNMHGKEALGRELMLQLSEFLCEEFRNRNQRIVQLIQDTRIHILPSMNPDGYEVAAAQGPNKPGYLVGRNNANGVDLNRNFPDLNTYIYYNEKYGGPNHHLPLPDNWKSQVEPETRAVIRWMHSFNFVLSANLHGGAVVANYPYDKSFEHRVRGVRRTASTPTPDDKLFQKLAKVYSYAHGWMFQGWNCGDYFPDGITNGASWYSLSKGMQDFNYLHTNCFEITLELSCDNFPPEEELQREWLGNKEALIQFLEQVHQGIKGMVLDQNYNNLANAVISVSGINHDVTSGDHGDYFRLLLPGIYTVSATAPGYDPETVTVTVGPAEPTLVNFHLKRSENLYFQGGSSGGSSGGSSGDAHKSEVAHRFKDLGEENFKALVLIAFAQYLQQCPFEDHVKLVNEVTEFAKTCVADESAENCDKSLHTLFGDKLCTVATLRETYGEMADCCAKQEPERNECFLQHKDDNPNLPRLVRPEVDVMCTAFHDNEETFLKKYLYEIARRHPYFYAPELLFFAKRYKAAFTECCQAADKAACLLPKLDELRDEGKASSAKQRLKCASLQKFGERAFKAWAVARLSQRFPKAEFAEVSKLVTDLTKVHTECCHGDLLECADDRADLAKYICENQDSISSKLKECCEKPLLEKSHCIAEVENDEMPADLPSLAADFVESKDVCKNYAEAKDVFLGMFLYEYARRHPDYSVVLLLRLAKTYETTLEKCCAAADPHECYAKVFDEFKPLVEEPQNLIKQNCELFEQLGEYKFQNALLVRYTKKVPQVSTPTLVEVSRNLGKVGSKCCKHPEAKRMPCAEDYLSVVLNQLCVLHEKTPVSDRVTKCCTESLVNRRPCFSALEVDETYVPKEFNAETFTFHADICTLSEKERQIKKQTALVELVKHKPKATKEQLKAVMDDFAAFVEKCCKADDKETCFAEEGKKLVAASQAALGL

SEQ ID NO: 206 - protein, 1002 aa, Artificial Sequence
  hCPN1 variant
VTFRHHRYDDLVRTLYKVQNECPGITRVYSIGRSVEGRHLYVLEFSDHPGIHEPLEPEVKYVGNMHGNEALGRELMLQLSEFLCEEFRNRNQRIVQLIQDTRIHILPSMNPDGYEVAAAQGPNKPGYLVGRNNANGVDLNRNFPDLNTYIYYNEKYGGPNHHLPLPDNWKSQVEPETRAVIRWMHSFNFVLSANLHGGAVHANYPYDKSFEHRVRGVRRTASTPTPDDKLFQKLAKVYSYAHGWMFQGWNCGDYFPDGITNGASWYSLSKGMQDFNYLHTNCFEITLELSCDKFPPEEELQREWLGNKEALIQFLEQVHQGIKGMVLDQNYNNLANAVISVSGINHDVTSGDHGDYFRLLLPGIYTVSATAPGYDPETVTVTVGPAEPTLVNFHLKRSENLYFQGGSSGGSSGGSSGDAHKSEVAHRFKDLGEENFKALVLIAFAQYLQQCPFEDHVKLVNEVTEFAKTCVADESAENCDKSLHTLFGDKLCTVATLRETYGEMADCCAKQEPERNECFLQHKDDNPNLPRLVRPEVDVMCTAFHDNEETFLKKYLYEIARRHPYFYAPELLFFAKRYKAAFTECCQAADKAACLLPKLDELRDEGKASSAKQRLKCASLQKFGERAFKAWAVARLSQRFPKAEFAEVSKLVTDLTKVHTECCHGDLLECADDRADLAKYICENQDSISSKLKECCEKPLLEKSHCIAEVENDEMPADLPSLAADFVESKDVCKNYAEAKDVFLGMFLYEYARRHPDYSVVLLLRLAKTYETTLEKCCAAADPHECYAKVFDEFKPLVEEPQNLIKQNCELFEQLGEYKFQNALLVRYTKKVPQVSTPTLVEVSRNLGKVGSKCCKHPEAKRMPCAEDYLSVVLNQLCVLHEKTPVSDRVTKCCTESLVNRRPCFSALEVDETYVPKEFNAETFTFHADICTLSEKERQIKKQTALVELVKHKPKATKEQLKAVMDDFAAFVEKCCKADDKETCFAEEGKKLVAASQAALGL

SEQ ID NO: 207 - protein, 1002 aa, Artificial Sequence
  hCPN1 variant
VTFRHHRYDDLVRTLYKVQNECPGITRVYSIGRSVEGRHLYVLEFSDHPGIHEPLEPEVKYVGNMHGNEALGRELMLQLSEFLCEEFRNRNQRIVQLIQDTRIHILPSMNPDGYEVAAAQGPNKPGYLVGRNNANGVDLNRNFPDLNTYIYYNEKYGGPNHHLPLPDNWKSQVEPETRAVIRWMHSFNFVLSANLHGGAVVADYPYDKSFEHRVRGVRRTASTPTPDDKLFQKLAKVYSYAHGWMFQGWNCGDYFPDGITNGASWYSLSKGMQDFNYLHTNCFEITLELSCDKFPPEEELQREWLGNKEALIQFLEQVHQGIKGMVLDQNYNNLANAVISVSGINHDVTSGDHGDYFRLLLPGIYTVSATAPGYDPETVTVTVGPAEPTLVNFHLKRSENLYFQGGSSGGSSGGSSGDAHKSEVAHRFKDLGEENFKALVLIAFAQYLQQCPFEDHVKLVNEVTEFAKTCVADESAENCDKSLHTLFGDKLCTVATLRETYGEMADCCAKQEPERNECFLQHKDDNPNLPRLVRPEVDVMCTAFHDNEETFLKKYLYEIARRHPYFYAPELLFFAKRYKAAFTECCQAADKAACLLPKLDELRDEGKASSAKQRLKCASLQKFGERAFKAWAVARLSQRFPKAEFAEVSKLVTDLTKVHTECCHGDLLECADDRADLAKYICENQDSISSKLKECCEKPLLEKSHCIAEVENDEMPADLPSLAADFVESKDVCKNYAEAKDVFLGMFLYEYARRHPDYSVVLLLRLAKTYETTLEKCCAAADPHECYAKVFDEFKPLVEEPQNLIKQNCELFEQLGEYKFQNALLVRYTKKVPQVSTPTLVEVSRNLGKVGSKCCKHPEAKRMPCAEDYLSVVLNQLCVLHEKTPVSDRVTKCCTESLVNRRPCFSALEVDETYVPKEFNAETFTFHADICTLSEKERQIKKQTALVELVKHKPKATKEQLKAVMDDFAAFVEKCCKADDKETCFAEEGKKLVAASQAALGL

SEQ ID NO: 208 - protein, 1002 aa, Artificial Sequence
  hCPN1 variant
VTFRHHRYDDLVRTLYKVQNECPGITRVYSIGRSVEGRHLYVLEFSDHPGIHEPLEPEVKYVGNMHGNEALGRELMLQLSEFLCEEFRNRNQRIVQLIQDTRIHILPSMNPDGYEVAAAQGPNKPGYLVGRNNANGVDLNRNFPDLNTYIYYNEKYGGPNHHLPLPDNWKSQVEPETRAVIRWMHSFNFVLSANLHGDAVVANYPYDKSFEHRVRGVRRTASTPTPDDKLFQKLAKVYSYAHGWMFQGWNCGDYFPDGITNGASWYSLSKGMQDFNYLHTNCFEITLELSCDKFPPEEELQREWLGNKEALIQFLEQVHQGIKGMVLDQNYNNLANAVISVSGINHDVTSGDHGDYFRLLLPGIYTVSATAPGYDPETVTVTVGPAEPTLVNFHLKRSENLYFQGGSSGGSSGGSSGDAHKSEVAHRFKDLGEENFKALVLIAFAQYLQQCPFEDHVKLVNEVTEFAKTCVADESAENCDKSLHTLFGDKLCTVATLRETYGEMADCCAKQEPERNECFLQHKDDNPNLPRLVRPEVDVMCTAFHDNEETFLKKYLYEIARRHPYFYAPELLFFAKRYKAAFTECCQAADKAACLLPKLDELRDEGKASSAKQRLKCASLQKFGERAFKAWAVARLSQRFPKAEFAEVSKLVTDLTKVHTECCHGDLLECADDRADLAKYICENQDSISSKLKECCEKPLLEKSHCIAEVENDEMPADLPSLAADFVESKDVCKNYAEAKDVFLGMFLYEYARRHPDYSVVLLLRLAKTYETTLEKCCAAADPHECYAKVFDEFKPLVEEPQNLIKQNCELFEQLGEYKFQNALLVRYTKKVPQVSTPTLVEVSRNLGKVGSKCCKHPEAKRMPCAEDYLSVVLNQLCVLHEKTPVSDRVTKCCTESLVNRRPCFSALEVDETYVPKEFNAETFTFHADICTLSEKERQIKKQTALVELVKHKPKATKEQLKAVMDDFAAFVEKCCKADDKETCFAEEGKKLVAASQAALGL

SEQ ID NO: 209 - protein, 1002 aa, Artificial Sequence
  hCPN1 variant
VTFRHHRYDDLVRTLYKVQNECPGITRVYSIGRSVEGRHLYVLEFSDHPGIHEPLEPEVKYVGNMHGNEALGRELMLQLSEFLCEEFRNRNQRIVQLIQDTRIHILPSMNPDGYEVAAAQGPNKPGYLVGRNNANGVDLNRNFPDLNTYIYYNEKYGGPNHHLPLPDNWKSQVEPETRAVIRWMHSFNFVLSANLHGDAVYANYPYDKSFEHRVRGVRRTASTPTPDDKLFQKLAKVYSYAHGWMFQGWNCGDYFPDGITNGASWYSLSKGMQDFNYLHTNCFEITLELSCDKFPPEEELQREWLGNKEALIQFLEQVHQGIKGMVLDQNYNNLANAVISVSGINHDVTSGDHGDYFRLLLPGIYTVSATAPGYDPETVTVTVGPAEPTLVNFHLKRSENLYFQGGSSGGSSGGSSGDAHKSEVAHRFKDLGEENFKALVLIAFAQYLQQCPFEDHVKLVNEVTEFAKTCVADESAENCDKSLHTLFGDKLCTVATLRETYGEMADCCAKQEPERNECFLQHKDDNPNLPRLVRPEVDVMCTAFHDNEETFLKKYLYEIARRHPYFYAPELLFFAKRYKAAFTECCQAADKAACLLPKLDELRDEGKASSAKQRLKCASLQKFGERAFKAWAVARLSQRFPKAEFAEVSKLVTDLTKVHTECCHGDLLECADDRADLAKYICENQDSISSKLKECCEKPLLEKSHCIAEVENDEMPADLPSLAADFVESKDVCKNYAEAKDVFLGMFLYEYARRHPDYSVVLLLRLAKTYETTLEKCCAAADPHECYAKVFDEFKPLVEEPQNLIKQNCELFEQLGEYKFQNALLVRYTKKVPQVSTPTLVEVSRNLGKVGSKCCKHPEAKRMPCAEDYLSVVLNQLCVLHEKTPVSDRVTKCCTESLVNRRPCFSALEVDETYVPKEFNAETFTFHADICTLSEKERQIKKQTALVELVKHKPKATKEQLKAVMDDFAAFVEKCCKADDKETCFAEEGKKLVAASQAALGL

SEQ ID NO: 210 - protein, 1002 aa, Artificial Sequence
  hCPN1 variant
VTFRHHRYDDLVRTLYKVQNECPGITRVYSIGRSVEGRHLYVLEFSDHPGIHEPLEPEVKYVGNMHGNEVLGRELMLQLSEFLCEEFRNRNQRIVQLIQDTRIHILPSMNPDGYEVAAAQGPNKPGYLVGRNNANGVDLNRNFPDLNTYIYYNEKYGGPNHHLPLPDNWKSQVEPETRAVIRWMHSFNFVLSANLHGGAVVANYPYDKSFEHRVRGVRRTASTPTPDDKLFQKLAKVYSYAHGWMFQGWNCGDYFPDGITNGASWYSLSKGMQDFNYLHTNCFEITLELSCDKFPPEEELQREWLGNKEALIQFLEQVHQGIKGMVLDQNYNNLANAVISVSGINHDVTSGDHGDYFRLLLPGIYTVSATAPGYDPETVTVTVGPAEPTLVNFHLKRSENLYFQGGSSGGSSGGSSGDAHKSEVAHRFKDLGEENFKALVLIAFAQYLQQCPFEDHVKLVNEVTEFAKTCVADESAENCDKSLHTLFGDKLCTVATLRETYGEMADCCAKQEPERNECFLQHKDDNPNLPRLVRPEVDVMCTAFHDNEETFLKKYLYEIARRHPYFYAPELLFFAKRYKAAFTECCQAADKAACLLPKLDELRDEGKASSAKQRLKCASLQKFGERAFKAWAVARLSQRFPKAEFAEVSKLVTDLTKVHTECCHGDLLECADDRADLAKYICENQDSISSKLKECCEKPLLEKSHCIAEVENDEMPADLPSLAADFVESKDVCKNYAEAKDVFLGMFLYEYARRHPDYSVVLLLRLAKTYETTLEKCCAAADPHECYAKVFDEFKPLVEEPQNLIKQNCELFEQLGEYKFQNALLVRYTKKVPQVSTPTLVEVSRNLGKVGSKCCKHPEAKRMPCAEDYLSVVLNQLCVLHEKTPVSDRVTKCCTESLVNRRPCFSALEVDETYVPKEFNAETFTFHADICTLSEKERQIKKQTALVELVKHKPKATKEQLKAVMDDFAAFVEKCCKADDKETCFAEEGKKLVAASQAALGL

SEQ ID NO: 211 - protein, 1002 aa, Artificial Sequence
  hCPN1 variant
VTFRHHRYDDLVRTLYKVQNECPGITRVYSIGRSVEGRHLYVLEFSDHPGIHEPLEPEVKYVGNMHGDEALGRELMLQLSEFLCEEFRNRNQRIVQLIQDTRIHILPSMNPDGYEVAAAQGPNKSGYLVGRNNANGVDLNRNFPDLNTYIYYNEKYGGPNHHLPLPDNWKSQVEPETRAVIRWMHSFNFVLSANLHGGAVVANYPYDKSFEHRVRGVRRTASTPTPDDKLFQKLAKVYSYAHGWMFQGWNCGDYFPDGITNGASWYSLSKGMQDFNYLHTNCFEITLELSCDKFPPEEELQREWLGNKEALIQFLEQVHQGIKGMVLDQNYNNLANAVISVSGINHDVTSGDHGDYFRLLLPGIYTVSATAPGYDPETVTVTVGPAEPTLVNFHLKRSENLYFQGGSSGGSSGGSSGDAHKSEVAHRFKDLGEENFKALVLIAFAQYLQQCPFEDHVKLVNEVTEFAKTCVADESAENCDKSLHTLFGDKLCTVATLRETYGEMADCCAKQEPERNECFLQHKDDNPNLPRLVRPEVDVMCTAFHDNEETFLKKYLYEIARRHPYFYAPELLFFAKRYKAAFTECCQAADKAACLLPKLDELRDEGKASSAKQRLKCASLQKFGERAFKAWAVARLSQRFPKAEFAEVSKLVTDLTKVHTECCHGDLLECADDRADLAKYICENQDSISSKLKECCEKPLLEKSHCIAEVENDEMPADLPSLAADFVESKDVCKNYAEAKDVFLGMFLYEYARRHPDYSVVLLLRLAKTYETTLEKCCAAADPHECYAKVFDEFKPLVEEPQNLIKQNCELFEQLGEYKFQNALLVRYTKKVPQVSTPTLVEVSRNLGKVGSKCCKHPEAKRMPCAEDYLSVVLNQLCVLHEKTPVSDRVTKCCTESLVNRRPCFSALEVDETYVPKEFNAETFTFHADICTLSEKERQIKKQTALVELVKHKPKATKEQLKAVMDDFAAFVEKCCKADDKETCFAEEGKKLVAASQAALGL

SEQ ID NO: 212 - protein, 1002 aa, Artificial Sequence
  hCPN1 variant
VTFRHHRYDDLVRTLYKVQNECPGITRVYSIGRSVEGRHLYVLEFSDHPGIHEPLEPEVKYVGNMHGDEVLGRELMLQLSEFLCEEFRNRNQRIVQLIQDTRIHILPSMNPDGYEVAAAQGPNKSGYLVGRNNANGVDLNRNFPDLNTYIYYNEKYGGPNHHLPLPDNWKSQVEPETRAVIRWMHSFNFVLSANLHGGAVVANYPYDKSFEHRVRGVRRTASTPTPDDKLFQKLAKVYSYAHGWMFQGWNCGDYFPDGITNGASWYSLSKGMQDFNYLHTNCFEITLELSCDKFPPEEELQREWLGNKEALIQFLEQVHQGIKGMVLDQNYNNLANAVISVSGINHDVTSGDHGDYFRLLLPGIYTVSATAPGYDPETVTVTVGPAEPTLVNFHLKRSENLYFQGGSSGGSSGGSSGDAHKSEVAHRFKDLGEENFKALVLIAFAQYLQQCPFEDHVKLVNEVTEFAKTCVADESAENCDKSLHTLFGDKLCTVATLRETYGEMADCCAKQEPERNECFLQHKDDNPNLPRLVRPEVDVMCTAFHDNEETFLKKYLYEIARRHPYFYAPELLFFAKRYKAAFTECCQAADKAACLLPKLDELRDEGKASSAKQRLKCASLQKFGERAFKAWAVARLSQRFPKAEFAEVSKLVTDLTKVHTECCHGDLLECADDRADLAKYICENQDSISSKLKECCEKPLLEKSHCIAEVENDEMPADLPSLAADFVESKDVCKNYAEAKDVFLGMFLYEYARRHPDYSVVLLLRLAKTYETTLEKCCAAADPHECYAKVFDEFKPLVEEPQNLIKQNCELFEQLGEYKFQNALLVRYTKKVPQVSTPTLVEVSRNLGKVGSKCCKHPEAKRMPCAEDYLSVVLNQLCVLHEKTPVSDRVTKCCTESLVNRRPCFSALEVDETYVPKEFNAETFTFHADICTLSEKERQIKKQTALVELVKHKPKATKEQLKAVMDDFAAFVEKCCKADDKETCFAEEGKKLVAASQAALGL

SEQ ID NO: 213 - protein, 995 aa, Artificial Sequence
  hCPN1 variant
VTFRHHRYDDLVRTLYKVQNECPGITRVYSIGRSVEGRHLYVLEFSDHPGIHEPLEPEVKYVGNMHGNEALGRELMLQLSEFLCEEFRNRNQRIVQLIQDTRIHILPSMNPDGYEVAAAQGPNKPGYLVGRNNANGVDLNRNFPDLNTYIYYNEKYGGPNHHLPLPDNWKSQVEPETRAVIRWMHSFNFVLSANLHGGAVVANYPYDKSFEHRVRGVRRTASTPTPDDKLFQKLAKVYSYAHGWMFQGWNCGDYFPDGITNGASWYSLSKGMQDFNYLHTNCFEITLQLSCDKFPPEEELQREWLGNKEALIQFLEQVHQGIKGMVLDQNYNNLANAVISVSGINHDVTSGDHGDYFRLLLPGIYTVSATAPGYDPETVTVTVGPAEPTLVNFHLKRSGSSGGSSGGSSGDAHKSEVAHRFKDLGEENFKALVLIAFAQYLQQCPFEDHVKLVNEVTEFAKTCVADESAENCDKSLHTLFGDKLCTVATLRETYGEMADCCAKQEPERNECFLQHKDDNPNLPRLVRPEVDVMCTAFHDNEETFLKKYLYEIARRHPYFYAPELLFFAKRYKAAFTECCQAADKAACLLPKLDELRDEGKASSAKQRLKCASLQKFGERAFKAWAVARLSQRFPKAEFAEVSKLVTDLTKVHTECCHGDLLECADDRADLAKYICENQDSISSKLKECCEKPLLEKSHCIAEVENDEMPADLPSLAADFVESKDVCKNYAEAKDVFLGMFLYEYARRHPDYSVVLLLRLAKTYETTLEKCCAAADPHECYAKVFDEFKPLVEEPQNLIKQNCELFEQLGEYKFQNALLVRYTKKVPQVSTPTLVEVSRNLGKVGSKCCKHPEAKRMPCAEDYLSVVLNQLCVLHEKTPVSDRVTKCCTESLVNRRPCFSALEVDETYVPKEFNAETFTFHADICTLSEKERQIKKQTALVELVKHKPKATKEQLKAVMDDFAAFVEKCCKADDKETCFAEEGKKLVAASQAALGL

SEQ ID NO: 214 - protein, 995 aa, Artificial Sequence
  hCPN1 variant
VTFRHHRYDDLVRTLYKVQNECPGITRVYSIGRSVEGRHLYVLEFSDHPGIHEPLEPEVKYVGNMHGNEALGRELMLQLSEFLCEEFRNRNQRIVQLIQDTRIHILPSMNPDGYEVAAAQGPNKPGYLVGRNNANGVDLNRNFPDLNTYIYYNEKYGGPNHHLPLPDNWKSQVEPETRAVIRWMHSFNFVLSANLHGGAVVANYPYDKSFEHRVRGVRRTASTPTPDDKLFQKLAKVYSYAHGWMFQGWNCGDYFPDGITNGASWFSLSKGMQDFNYLHTNCFEITLELSCDKFPPEEELQREWLGNKEALIQFLEQVHQGIKGMVLDQNYNNLANAVISVSGINHDVTSGDHGDYFRLLLPGIYTVSATAPGYDPETVTVTVGPAEPTLVNFHLKRSGSSGGSSGGSSGDAHKSEVAHRFKDLGEENFKALVLIAFAQYLQQCPFEDHVKLVNEVTEFAKTCVADESAENCDKSLHTLFGDKLCTVATLRETYGEMADCCAKQEPERNECFLQHKDDNPNLPRLVRPEVDVMCTAFHDNEETFLKKYLYEIARRHPYFYAPELLFFAKRYKAAFTECCQAADKAACLLPKLDELRDEGKASSAKQRLKCASLQKFGERAFKAWAVARLSQRFPKAEFAEVSKLVTDLTKVHTECCHGDLLECADDRADLAKYICENQDSISSKLKECCEKPLLEKSHCIAEVENDEMPADLPSLAADFVESKDVCKNYAEAKDVFLGMFLYEYARRHPDYSVVLLLRLAKTYETTLEKCCAAADPHECYAKVFDEFKPLVEEPQNLIKQNCELFEQLGEYKFQNALLVRYTKKVPQVSTPTLVEVSRNLGKVGSKCCKHPEAKRMPCAEDYLSVVLNQLCVLHEKTPVSDRVTKCCTESLVNRRPCFSALEVDETYVPKEFNAETFTFHADICTLSEKERQIKKQTALVELVKHKPKATKEQLKAVMDDFAAFVEKCCKADDKETCFAEEGKKLVAASQAALGL

SEQ ID NO: 215 - protein, 995 aa, Artificial Sequence
  hCPN1 variant
VTFRHHRYDDLVRTLYKVQNECPGITRVYSIGRSVEGRHLYVLEFSDHPGIHEPLEPEVKYVGNMHGNEALGRELMLQLSEFLCEEFRNRNQRIVQLIQDTRIHILPSMNPDGYEVAAAQGPNKPGYLVGRNNANGVDLNRNFPDLNTYIYYNEKYGGPNHHLPLPDNWKSQVEPETRAVIRWMHSFNFVLSANLHGGAVVANYPYDKSFEHRVRGVRRTASTPTPDDKLFQKLAKVYSYAHGWMFQGWNCGDYFPDGITNGASWFSLSKGMQDFNYLHTNCFEITLQLSCDKFPPEEELQREWLGNKEALIQFLEQVHQGIKGMVLDQNYNNLANAVISVSGINHDVTSGDHGDYFRLLLPGIYTVSATAPGYDPETVTVTVGPAEPTLVNFHLKRSGSSGGSSGGSSGDAHKSEVAHRFKDLGEENFKALVLIAFAQYLQQCPFEDHVKLVNEVTEFAKTCVADESAENCDKSLHTLFGDKLCTVATLRETYGEMADCCAKQEPERNECFLQHKDDNPNLPRLVRPEVDVMCTAFHDNEETFLKKYLYEIARRHPYFYAPELLFFAKRYKAAFTECCQAADKAACLLPKLDELRDEGKASSAKQRLKCASLQKFGERAFKAWAVARLSQRFPKAEFAEVSKLVTDLTKVHTECCHGDLLECADDRADLAKYICENQDSISSKLKECCEKPLLEKSHCIAEVENDEMPADLPSLAADFVESKDVCKNYAEAKDVFLGMFLYEYARRHPDYSVVLLLRLAKTYETTLEKCCAAADPHECYAKVFDEFKPLVEEPQNLIKQNCELFEQLGEYKFQNALLVRYTKKVPQVSTPTLVEVSRNLGKVGSKCCKHPEAKRMPCAEDYLSVVLNQLCVLHEKTPVSDRVTKCCTESLVNRRPCFSALEVDETYVPKEFNAETFTFHADICTLSEKERQIKKQTALVELVKHKPKATKEQLKAVMDDFAAFVEKCCKADDKETCFAEEGKKLVAASQAALGL

SEQ ID NO: 216 - protein, 995 aa, Artificial Sequence
  hCPN1 variant
VTFRHHRYDDLVRTLYKVQNECPGITRVYSIGRSVEGRHLYVLEFSDHPGIHEPLEPEVKYVGNMHGNEALGRELMLQLSEFLCEEFRNRNQRIVQLIQDTRIHILPSMNPDGYEVAAAQGPNKPGYLVGRNNANGVDLNRNFPDLNTYIYYNEKYGGPNHHLPLPDNWKSQVEPETRAVIRWMHSFNFVLSANLHGGSVVANYPYDKSFEHRVRGVRRTASTPTPDDKLFQKLAKVYSYAHGWMFQGWNCGDYFPDGITNGASWYSLSKGMQDFNYLHTNCFEITLELSCDKFPPEEELQREWLGNKEALIQFLEQVHQGIKGMVLDQNYNNLANAVISVSGINHDVTSGDHGDYFRLLLPGIYTVSATAPGYDPETVTVTVGPAEPTLVNFHLKRSGSSGGSSGGSSGDAHKSEVAHRFKDLGEENFKALVLIAFAQYLQQCPFEDHVKLVNEVTEFAKTCVADESAENCDKSLHTLFGDKLCTVATLRETYGEMADCCAKQEPERNECFLQHKDDNPNLPRLVRPEVDVMCTAFHDNEETFLKKYLYEIARRHPYFYAPELLFFAKRYKAAFTECCQAADKAACLLPKLDELRDEGKASSAKQRLKCASLQKFGERAFKAWAVARLSQRFPKAEFAEVSKLVTDLTKVHTECCHGDLLECADDRADLAKYICENQDSISSKLKECCEKPLLEKSHCIAEVENDEMPADLPSLAADFVESKDVCKNYAEAKDVFLGMFLYEYARRHPDYSVVLLLRLAKTYETTLEKCCAAADPHECYAKVFDEFKPLVEEPQNLIKQNCELFEQLGEYKFQNALLVRYTKKVPQVSTPTLVEVSRNLGKVGSKCCKHPEAKRMPCAEDYLSVVLNQLCVLHEKTPVSDRVTKCCTESLVNRRPCFSALEVDETYVPKEFNAETFTFHADICTLSEKERQIKKQTALVELVKHKPKATKEQLKAVMDDFAAFVEKCCKADDKETCFAEEGKKLVAASQAALGL

SEQ ID NO: 217 - protein, 995 aa, Artificial Sequence
  hCPN1 variant
VTFRHHRYDDLVRTLYKVQNECPGITRVYSIGRSVEGRHLYVLEFSDHPGIHEPLEPEVKYVGNMHGNEALGRELMLQLSEFLCEEFRNRNQRIVQLIQDTRIHILPSMNPDGYEVAAAQGPNRSGYLVGRNNANGVDLNRNFPDLNTYIYYNEKYGGPNHHLPLPDNWKSQVEPETRAVIRWMHSFNFVLSANLHGGAVVANYPYDKSFEHRVRGVRRTASTPTPDDKLFQKLAKVYSYAHGWMFQGWNCGDYFPDGITNGASWYSLSKGMQDFNYLHTNCFEITLELSCDKFPPEEELQREWLGNKEALIQFLEQVHQGIKGMVLDQNYNNLANAVISVSGINHDVTSGDHGDYFRLLLPGIYTVSATAPGYDPETVTVTVGPAEPTLVNFHLKRSGSSGGSSGGSSGDAHKSEVAHRFKDLGEENFKALVLIAFAQYLQQCPFEDHVKLVNEVTEFAKTCVADESAENCDKSLHTLFGDKLCTVATLRETYGEMADCCAKQEPERNECFLQHKDDNPNLPRLVRPEVDVMCTAFHDNEETFLKKYLYEIARRHPYFYAPELLFFAKRYKAAFTECCQAADKAACLLPKLDELRDEGKASSAKQRLKCASLQKFGERAFKAWAVARLSQRFPKAEFAEVSKLVTDLTKVHTECCHGDLLECADDRADLAKYICENQDSISSKLKECCEKPLLEKSHCIAEVENDEMPADLPSLAADFVESKDVCKNYAEAKDVFLGMFLYEYARRHPDYSVVLLLRLAKTYETTLEKCCAAADPHECYAKVFDEFKPLVEEPQNLIKQNCELFEQLGEYKFQNALLVRYTKKVPQVSTPTLVEVSRNLGKVGSKCCKHPEAKRMPCAEDYLSVVLNQLCVLHEKTPVSDRVTKCCTESLVNRRPCFSALEVDETYVPKEFNAETFTFHADICTLSEKERQIKKQTALVELVKHKPKATKEQLKAVMDDFAAFVEKCCKADDKETCFAEEGKKLVAASQAALGL

SEQ ID NO: 218 - protein, 995 aa, Artificial Sequence
  hCPN1 variant
VTFRHHRYDDLVRTLYKVQNECPGITRVYSIGRSVEGRHLYVLEFSDHPGIHEPLEPEVKYVGNMHGNEALGRELMLQLSEFLCEEFRNRNQRIVQLIQDTRIHILPSMNPDGYEVAAAQTYNQDGYLVGRNNANGVDLNRNFPDLNTYIYYNEKYGGPNHHLPLPDNWKSQVEPETRAVIRWMHSFNFVLSANLHGGAVVANYPYDKSFEHRVRGVRRTASTPTPDDKLFQKLAKVYSYAHGWMFQGWNCGDYFPDGITNGASWYSLSKGMQDFNYLHTNCFEITLELSCDKFPPEEELQREWLGNKEALIQFLEQVHQGIKGMVLDQNYNNLANAVISVSGINHDVTSGDHGDYFRLLLPGIYTVSATAPGYDPETVTVTVGPAEPTLVNFHLKRSGSSGGSSGGSSGDAHKSEVAHRFKDLGEENFKALVLIAFAQYLQQCPFEDHVKLVNEVTEFAKTCVADESAENCDKSLHTLFGDKLCTVATLRETYGEMADCCAKQEPERNECFLQHKDDNPNLPRLVRPEVDVMCTAFHDNEETFLKKYLYEIARRHPYFYAPELLFFAKRYKAAFTECCQAADKAACLLPKLDELRDEGKASSAKQRLKCASLQKFGERAFKAWAVARLSQRFPKAEFAEVSKLVTDLTKVHTECCHGDLLECADDRADLAKYICENQDSISSKLKECCEKPLLEKSHCIAEVENDEMPADLPSLAADFVESKDVCKNYAEAKDVFLGMFLYEYARRHPDYSVVLLLRLAKTYETTLEKCCAAADPHECYAKVFDEFKPLVEEPQNLIKQNCELFEQLGEYKFQNALLVRYTKKVPQVSTPTLVEVSRNLGKVGSKCCKHPEAKRMPCAEDYLSVVLNQLCVLHEKTPVSDRVTKCCTESLVNRRPCFSALEVDETYVPKEFNAETFTFHADICTLSEKERQIKKQTALVELVKHKPKATKEQLKAVMDDFAAFVEKCCKADDKETCFAEEGKKLVAASQAALGL

SEQ ID NO: 219 - protein, 995 aa, Artificial Sequence
  hCPN1 variant
VTFRHHRYDDLVRTLYKVQNECPGITRVYSIGRSVEGRHLYVLEFSDHPGIHEPLEPEVKYVGNMHGNEALGRELMLQLSEFLCEEFRNRNQRIVQLIQDTRIHILPSMNPDGYEVAAAQGPYRPGYLVGRNNANGVDLNRNFPDLNTYIYYNEKYGGPNHHLPLPDNWKSQVEPETRAVIRWMHSFNFVLSANLHGGAVVANYPYDKSFEHRVRGVRRTASTPTPDDKLFQKLAKVYSYAHGWMFQGWNCGDYFPDGITNGASWYSLSKGMQDFNYLHTNCFEITLELSCDKFPPEEELQREWLGNKEALIQFLEQVHQGIKGMVLDQNYNNLANAVISVSGINHDVTSGDHGDYFRLLLPGIYTVSATAPGYDPETVTVTVGPAEPTLVNFHLKRSGSSGGSSGGSSGDAHKSEVAHRFKDLGEENFKALVLIAFAQYLQQCPFEDHVKLVNEVTEFAKTCVADESAENCDKSLHTLFGDKLCTVATLRETYGEMADCCAKQEPERNECFLQHKDDNPNLPRLVRPEVDVMCTAFHDNEETFLKKYLYEIARRHPYFYAPELLFFAKRYKAAFTECCQAADKAACLLPKLDELRDEGKASSAKQRLKCASLQKFGERAFKAWAVARLSQRFPKAEFAEVSKLVTDLTKVHTECCHGDLLECADDRADLAKYICENQDSISSKLKECCEKPLLEKSHCIAEVENDEMPADLPSLAADFVESKDVCKNYAEAKDVFLGMFLYEYARRHPDYSVVLLLRLAKTYETTLEKCCAAADPHECYAKVFDEFKPLVEEPQNLIKQNCELFEQLGEYKFQNALLVRYTKKVPQVSTPTLVEVSRNLGKVGSKCCKHPEAKRMPCAEDYLSVVLNQLCVLHEKTPVSDRVTKCCTESLVNRRPCFSALEVDETYVPKEFNAETFTFHADICTLSEKERQIKKQTALVELVKHKPKATKEQLKAVMDDFAAFVEKCCKADDKETCFAEEGKKLVAASQAALGL

SEQ ID NO: 220 - protein, 995 aa, Artificial Sequence
  hCPN1 variant
VTFRHHRYDDLVRTLYKVQNECPGITRVYSIGRSVEGRHLYVLEFSDHPGIHEPLEPEVKYVGNMHGNEALGRELMLQLSEFLCEEFRNRNQRIVQLIQDTRIHILPSMNPDGYEVAAAQDDTIPGYLVGRNNANGVDLNRNFPDLNTYIYYNEKYGGPNHHLPLPDNWKSQVEPETRAVIRWMHSFNFVLSANLHGGAVVANYPYDKSFEHRVRGVRRTASTPTPDDKLFQKLAKVYSYAHGWMFQGWNCGDYFPDGITNGASWYSLSKGMQDFNYLHTNCFEITLELSCDKFPPEEELQREWLGNKEALIQFLEQVHQGIKGMVLDQNYNNLANAVISVSGINHDVTSGDHGDYFRLLLPGIYTVSATAPGYDPETVTVTVGPAEPTLVNFHLKRSGSSGGSSGGSSGDAHKSEVAHRFKDLGEENFKALVLIAFAQYLQQCPFEDHVKLVNEVTEFAKTCVADESAENCDKSLHTLFGDKLCTVATLRETYGEMADCCAKQEPERNECFLQHKDDNPNLPRLVRPEVDVMCTAFHDNEETFLKKYLYEIARRHPYFYAPELLFFAKRYKAAFTECCQAADKAACLLPKLDELRDEGKASSAKQRLKCASLQKFGERAFKAWAVARLSQRFPKAEFAEVSKLVTDLTKVHTECCHGDLLECADDRADLAKYICENQDSISSKLKECCEKPLLEKSHCIAEVENDEMPADLPSLAADFVESKDVCKNYAEAKDVFLGMFLYEYARRHPDYSVVLLLRLAKTYETTLEKCCAAADPHECYAKVFDEFKPLVEEPQNLIKQNCELFEQLGEYKFQNALLVRYTKKVPQVSTPTLVEVSRNLGKVGSKCCKHPEAKRMPCAEDYLSVVLNQLCVLHEKTPVSDRVTKCCTESLVNRRPCFSALEVDETYVPKEFNAETFTFHADICTLSEKERQIKKQTALVELVKHKPKATKEQLKAVMDDFAAFVEKCCKADDKETCFAEEGKKLVAASQAALGL

SEQ ID NO: 221 - protein, 995 aa, Artificial Sequence
  hCPN1 variant
VTFRHHRYDDLVRTLYKVQNECPGITRVYSIGRSVEGRHLYVLEFSDHPGIHEPLEPEVKYVGNMHGNEALGRELMLQLSEFLCEEFRNRNQRIVQLIQDTRIHILPSMNPDGYEVAAAQDHNIPGYLVGRNNANGVDLNRNFPDLNTYIYYNEKYGGPNHHLPLPDNWKSQVEPETRAVIRWMHSFNFVLSANLHGGAVVANYPYDKSFEHRVRGVRRTASTPTPDDKLFQKLAKVYSYAHGWMFQGWNCGDYFPDGITNGASWYSLSKGMQDFNYLHTNCFEITLELSCDKFPPEEELQREWLGNKEALIQFLEQVHQGIKGMVLDQNYNNLANAVISVSGINHDVTSGDHGDYFRLLLPGIYTVSATAPGYDPETVTVTVGPAEPTLVNFHLKRSGSSGGSSGGSSGDAHKSEVAHRFKDLGEENFKALVLIAFAQYLQQCPFEDHVKLVNEVTEFAKTCVADESAENCDKSLHTLFGDKLCTVATLRETYGEMADCCAKQEPERNECFLQHKDDNPNLPRLVRPEVDVMCTAFHDNEETFLKKYLYEIARRHPYFYAPELLFFAKRYKAAFTECCQAADKAACLLPKLDELRDEGKASSAKQRLKCASLQKFGERAFKAWAVARLSQRFPKAEFAEVSKLVTDLTKVHTECCHGDLLECADDRADLAKYICENQDSISSKLKECCEKPLLEKSHCIAEVENDEMPADLPSLAADFVESKDVCKNYAEAKDVFLGMFLYEYARRHPDYSVVLLLRLAKTYETTLEKCCAAADPHECYAKVFDEFKPLVEEPQNLIKQNCELFEQLGEYKFQNALLVRYTKKVPQVSTPTLVEVSRNLGKVGSKCCKHPEAKRMPCAEDYLSVVLNQLCVLHEKTPVSDRVTKCCTESLVNRRPCFSALEVDETYVPKEFNAETFTFHADICTLSEKERQIKKQTALVELVKHKPKATKEQLKAVMDDFAAFVEKCCKADDKETCFAEEGKKLVAASQAALGL

SEQ ID NO: 222 - protein, 995 aa, Artificial Sequence
  hCPN1 variant
VTFRHHRYDDLVRTLYKVQNECPGITRVYSIGRSVEGRHLYVLEFSDHPGIHEPLEPEVKYVGNMHGNEALGRELMLQLSEFLCEEFRNRNQRIVQLIQDTRIHILPSMNPDGYEVAAAQREYIPGYLVGRNNANGVDLNRNFPDLNTYIYYNEKYGGPNHHLPLPDNWKSQVEPETRAVIRWMHSFNFVLSANLHGGAVVANYPYDKSFEHRVRGVRRTASTPTPDDKLFQKLAKVYSYAHGWMFQGWNCGDYFPDGITNGASWYSLSKGMQDFNYLHTNCFEITLELSCDKFPPEEELQREWLGNKEALIQFLEQVHQGIKGMVLDQNYNNLANAVISVSGINHDVTSGDHGDYFRLLLPGIYTVSATAPGYDPETVTVTVGPAEPTLVNFHLKRSGSSGGSSGGSSGDAHKSEVAHRFKDLGEENFKALVLIAFAQYLQQCPFEDHVKLVNEVTEFAKTCVADESAENCDKSLHTLFGDKLCTVATLRETYGEMADCCAKQEPERNECFLQHKDDNPNLPRLVRPEVDVMCTAFHDNEETFLKKYLYEIARRHPYFYAPELLFFAKRYKAAFTECCQAADKAACLLPKLDELRDEGKASSAKQRLKCASLQKFGERAFKAWAVARLSQRFPKAEFAEVSKLVTDLTKVHTECCHGDLLECADDRADLAKYICENQDSISSKLKECCEKPLLEKSHCIAEVENDEMPADLPSLAADFVESKDVCKNYAEAKDVFLGMFLYEYARRHPDYSVVLLLRLAKTYETTLEKCCAAADPHECYAKVFDEFKPLVEEPQNLIKQNCELFEQLGEYKFQNALLVRYTKKVPQVSTPTLVEVSRNLGKVGSKCCKHPEAKRMPCAEDYLSVVLNQLCVLHEKTPVSDRVTKCCTESLVNRRPCFSALEVDETYVPKEFNAETFTFHADICTLSEKERQIKKQTALVELVKHKPKATKEQLKAVMDDFAAFVEKCCKADDKETCFAEEGKKLVAASQAALGL

SEQ ID NO: 223 - protein, 995 aa, Artificial Sequence
  hCPN1 variant
VTFRHHRYDDLVRTLYKVQNECPGITRVYSIGRSVEGRHLYVLEFSDHPGIHEPLEPEVKYVGNMHGNEALGRELMLQLSEFLCEEFRNRNQRIVQLIQDTRIHILPSMNPDGYEVAAAQDHNQPGYLVGRNNANGVDLNRNFPDLNTYIYYNEKYGGPNHHLPLPDNWKSQVEPETRAVIRWMHSFNFVLSANLHGGAVVANYPYDKSFEHRVRGVRRTASTPTPDDKLFQKLAKVYSYAHGWMFQGWNCGDYFPDGITNGASWYSLSKGMQDFNYLHTNCFEITLELSCDKFPPEEELQREWLGNKEALIQFLEQVHQGIKGMVLDQNYNNLANAVISVSGINHDVTSGDHGDYFRLLLPGIYTVSATAPGYDPETVTVTVGPAEPTLVNFHLKRSGSSGGSSGGSSGDAHKSEVAHRFKDLGEENFKALVLIAFAQYLQQCPFEDHVKLVNEVTEFAKTCVADESAENCDKSLHTLFGDKLCTVATLRETYGEMADCCAKQEPERNECFLQHKDDNPNLPRLVRPEVDVMCTAFHDNEETFLKKYLYEIARRHPYFYAPELLFFAKRYKAAFTECCQAADKAACLLPKLDELRDEGKASSAKQRLKCASLQKFGERAFKAWAVARLSQRFPKAEFAEVSKLVTDLTKVHTECCHGDLLECADDRADLAKYICENQDSISSKLKECCEKPLLEKSHCIAEVENDEMPADLPSLAADFVESKDVCKNYAEAKDVFLGMFLYEYARRHPDYSVVLLLRLAKTYETTLEKCCAAADPHECYAKVFDEFKPLVEEPQNLIKQNCELFEQLGEYKFQNALLVRYTKKVPQVSTPTLVEVSRNLGKVGSKCCKHPEAKRMPCAEDYLSVVLNQLCVLHEKTPVSDRVTKCCTESLVNRRPCFSALEVDETYVPKEFNAETFTFHADICTLSEKERQIKKQTALVELVKHKPKATKEQLKAVMDDFAAFVEKCCKADDKETCFAEEGKKLVAASQAALGL

SEQ ID NO: 224 - protein, 995 aa, Artificial Sequence
  hCPN1 variant
VTFRHHRYDDLVRTLYKVQNECPGITRVYSIGRSVEGRHLYVLEFSDHPGIHEPLEPEVKYVGNMHGNEALGRELMLQLSEFLCEEFRNRNQRIVQLIQDTRIHILPSMNPDGYEVAAAQIPDKPGYLVGRNNANGVDLNRNFPDLNTYIYYNEKYGGPNHHLPLPDNWKSQVEPETRAVIRWMHSFNFVLSANLHGGAVVANYPYDKSFEHRVRGVRRTASTPTPDDKLFQKLAKVYSYAHGWMFQGWNCGDYFPDGITNGASWYSLSKGMQDFNYLHTNCFEITLELSCDKFPPEEELQREWLGNKEALIQFLEQVHQGIKGMVLDQNYNNLANAVISVSGINHDVTSGDHGDYFRLLLPGIYTVSATAPGYDPETVTVTVGPAEPTLVNFHLKRSGSSGGSSGGSSGDAHKSEVAHRFKDLGEENFKALVLIAFAQYLQQCPFEDHVKLVNEVTEFAKTCVADESAENCDKSLHTLFGDKLCTVATLRETYGEMADCCAKQEPERNECFLQHKDDNPNLPRLVRPEVDVMCTAFHDNEETFLKKYLYEIARRHPYFYAPELLFFAKRYKAAFTECCQAADKAACLLPKLDELRDEGKASSAKQRLKCASLQKFGERAFKAWAVARLSQRFPKAEFAEVSKLVTDLTKVHTECCHGDLLECADDRADLAKYICENQDSISSKLKECCEKPLLEKSHCIAEVENDEMPADLPSLAADFVESKDVCKNYAEAKDVFLGMFLYEYARRHPDYSVVLLLRLAKTYETTLEKCCAAADPHECYAKVFDEFKPLVEEPQNLIKQNCELFEQLGEYKFQNALLVRYTKKVPQVSTPTLVEVSRNLGKVGSKCCKHPEAKRMPCAEDYLSVVLNQLCVLHEKTPVSDRVTKCCTESLVNRRPCFSALEVDETYVPKEFNAETFTFHADICTLSEKERQIKKQTALVELVKHKPKATKEQLKAVMDDFAAFVEKCCKADDKETCFAEEGKKLVAASQAALGL

SEQ ID NO: 225 - protein, 924 aa, Artificial Sequence
  hCPN1 variant
VTFRHHRYDDLVRTLYKVQNECPGITRVYSIGRSVEGRHLYVLEFSDHPGIHEPNEPEVKYVGNMHGNEALGRELMLQLSEFLCEEFRNRNQRIVQLIQDTRIHILPSMNPDGYEVAAAQGPNKPGYLVGRNNANGVDLNRNFPDLNTYIYYNEKYGGPNRHLPLPDNWKSQVEPETRAVIRWMHSFDFKLSANLHGGAVVANYPYDKSFEHRVRGVRRTASTPTPDDEWFQKLAKVYSYAHGWMFQGWNCGDYFPDGITNGASWYSLSKGMQDFNYLHTDSYEITLELSCDKFPPEEELQREWLGNKEALIQFLEQVHNENLYFQGGSSGGSSGGSSGDAHKSEVAHRFKDLGEENFKALVLIAFAQYLQQCPFEDHVKLVNEVTEFAKTCVADESAENCDKSLHTLFGDKLCTVATLRETYGEMADCCAKQEPERNECFLQHKDDNPNLPRLVRPEVDVMCTAFHDNEETFLKKYLYEIARRHPYFYAPELLFFAKRYKAAFTECCQAADKAACLLPKLDELRDEGKASSAKQRLKCASLQKFGERAFKAWAVARLSQRFPKAEFAEVSKLVTDLTKVHTECCHGDLLECADDRADLAKYICENQDSISSKLKECCEKPLLEKSHCIAEVENDEMPADLPSLAADFVESKDVCKNYAEAKDVFLGMFLYEYARRHPDYSVVLLLRLAKTYETTLEKCCAAADPHECYAKVFDEFKPLVEEPQNLIKQNCELFEQLGEYKFQNALLVRYTKKVPQVSTPTLVEVSRNLGKVGSKCCKHPEAKRMPCAEDYLSVVLNQLCVLHEKTPVSDRVTKCCTESLVNRRPCFSALEVDETYVPKEFNAETFTFHADICTLSEKERQIKKQTALVELVKHKPKATKEQLKAVMDDFAAFVEKCCKADDKETCFAEEGKKLVAASQAALGL

SEQ ID NO: 226 - protein, 924 aa, Artificial Sequence
  hCPN1 variant
VTFRHHRYDDLVRTLYKVQNECPGITRVYSIGRSVEGRHLYVLEFSDHPGIHEPNEPEVKYVGNMHGNEALGRELMLQLSEFLCEEFRNRNQRIVQLIQDTRIHILPSMNPDGYEVAAAQGPNKPGYLVGRNNANGVDLNRNFPDLNTYIYYNEKYGGPNSHLPLPDNWKSQVEPETRAVIRWMHSFDFRLSANLHGGAVVANYPYDKSFEHRVRGVRRTASTPTPDDEWFQKLAKVYSYAHGWMFQGWNCGDYFPDGITNGASWYSLSKGMQDFNYLHTNSYEITLELSCDKFPPEEELQREWLGNKEALIQFLEQVHNENLYFQGGSSGGSSGGSSGDAHKSEVAHRFKDLGEENFKALVLIAFAQYLQQCPFEDHVKLVNEVTEFAKTCVADESAENCDKSLHTLFGDKLCTVATLRETYGEMADCCAKQEPERNECFLQHKDDNPNLPRLVRPEVDVMCTAFHDNEETFLKKYLYEIARRHPYFYAPELLFFAKRYKAAFTECCQAADKAACLLPKLDELRDEGKASSAKQRLKCASLQKFGERAFKAWAVARLSQRFPKAEFAEVSKLVTDLTKVHTECCHGDLLECADDRADLAKYICENQDSISSKLKECCEKPLLEKSHCIAEVENDEMPADLPSLAADFVESKDVCKNYAEAKDVFLGMFLYEYARRHPDYSVVLLLRLAKTYETTLEKCCAAADPHECYAKVFDEFKPLVEEPQNLIKQNCELFEQLGEYKFQNALLVRYTKKVPQVSTPTLVEVSRNLGKVGSKCCKHPEAKRMPCAEDYLSVVLNQLCVLHEKTPVSDRVTKCCTESLVNRRPCFSALEVDETYVPKEFNAETFTFHADICTLSEKERQIKKQTALVELVKHKPKATKEQLKAVMDDFAAFVEKCCKADDKETCFAEEGKKLVAASQAALGL

SEQ ID NO: 227 - protein, 924 aa, Artificial Sequence
  hCPN1 variant
VTFRHHRYDDLVRTLYKVQNECPGITRVYSIGRSVEGRHLYVLEFSDHPGIHEPNEPEVKYVGNMHGNEALGRELMLQLSEFLCEEFRNRNQRIVQLIQDTRIHILPSMNPDGYEVAAAQGPNKPGYLVGRNNANGVDLNRNFPDLNTYIYYNEKYGGPNKHLPLPDNWKSQVEPETRAVIRWMHSFDFKLSANLHGGAVVANYPYDKSFEHRVRGVRRTASTPTPDDEWFQKLAKVYSYAHGWMFQGWNCGDYFPDGITNGASWYSLSKGMQDFNYLHTNSYEITLELSCDKFPPEEELQREWLGNKEALIQFLEQVHNENLYFQGGSSGGSSGGSSGDAHKSEVAHRFKDLGEENFKALVLIAFAQYLQQCPFEDHVKLVNEVTEFAKTCVADESAENCDKSLHTLFGDKLCTVATLRETYGEMADCCAKQEPERNECFLQHKDDNPNLPRLVRPEVDVMCTAFHDNEETFLKKYLYEIARRHPYFYAPELLFFAKRYKAAFTECCQAADKAACLLPKLDELRDEGKASSAKQRLKCASLQKFGERAFKAWAVARLSQRFPKAEFAEVSKLVTDLTKVHTECCHGDLLECADDRADLAKYICENQDSISSKLKECCEKPLLEKSHCIAEVENDEMPADLPSLAADFVESKDVCKNYAEAKDVFLGMFLYEYARRHPDYSVVLLLRLAKTYETTLEKCCAAADPHECYAKVFDEFKPLVEEPQNLIKQNCELFEQLGEYKFQNALLVRYTKKVPQVSTPTLVEVSRNLGKVGSKCCKHPEAKRMPCAEDYLSVVLNQLCVLHEKTPVSDRVTKCCTESLVNRRPCFSALEVDETYVPKEFNAETFTFHADICTLSEKERQIKKQTALVELVKHKPKATKEQLKAVMDDFAAFVEKCCKADDKETCFAEEGKKLVAASQAALGL

SEQ ID NO: 228 - protein, 995 aa, Artificial Sequence
  hCPN1 variant
VTFRHHRYDDLVRTLYKVQNECPGITRVYSIGRSVEGRHLYVLEFSDHPGIHEPLEPEVKYVGNMHGNEALGRELMLQLSEFLCEEFRNRNQRIVQLIQDTRIHILPSMNPDGYEVAAAQGWRYPGYLVGRNNANGVDLNRNFPDLNTYIYYNEKYGGPNHHLPLPDNWKSQVEPETRAVIRWMHSFNFVLSANLHGGAVVANYPYDKSFEHRVRGVRRTASTPTPDDKLFQKLAKVYSYAHGWMFQGWNCGDYFPDGITNGASWYSLSKGMQDFNYLHTNCFEITLELSCDKFPPEEELQREWLGNKEALIQFLEQVHQGIKGMVLDQNYNNLANAVISVSGINHDVTSGDHGDYFRLLLPGIYTVSATAPGYDPETVTVTVGPAEPTLVNFHLKRSGSSGGSSGGSSGDAHKSEVAHRFKDLGEENFKALVLIAFAQYLQQCPFEDHVKLVNEVTEFAKTCVADESAENCDKSLHTLFGDKLCTVATLRETYGEMADCCAKQEPERNECFLQHKDDNPNLPRLVRPEVDVMCTAFHDNEETFLKKYLYEIARRHPYFYAPELLFFAKRYKAAFTECCQAADKAACLLPKLDELRDEGKASSAKQRLKCASLQKFGERAFKAWAVARLSQRFPKAEFAEVSKLVTDLTKVHTECCHGDLLECADDRADLAKYICENQDSISSKLKECCEKPLLEKSHCIAEVENDEMPADLPSLAADFVESKDVCKNYAEAKDVFLGMFLYEYARRHPDYSVVLLLRLAKTYETTLEKCCAAADPHECYAKVFDEFKPLVEEPQNLIKQNCELFEQLGEYKFQNALLVRYTKKVPQVSTPTLVEVSRNLGKVGSKCCKHPEAKRMPCAEDYLSVVLNQLCVLHEKTPVSDRVTKCCTESLVNRRPCFSALEVDETYVPKEFNAETFTFHADICTLSEKERQIKKQTALVELVKHKPKATKEQLKAVMDDFAAFVEKCCKADDKETCFAEEGKKLVAASQAALGL

SEQ ID NO: 229 - protein, 995 aa, Artificial Sequence
  hCPN1 variant
VTFRHHRYDDLVRTLYKVQNECPGITRVYSIGRSVEGRHLYVLEFSDHPGIHEPLEPEVKYVGNMHGNEALGRELMLQLSEFLCEEFRNRNQRIVQLIQDTRIHILPSMNPDGYEVAAAQGYRYPGYLVGRNNANGVDLNRNFPDLNTYIYYNEKYGGPNHHLPLPDNWKSQVEPETRAVIRWMHSFNFVLSANLHGGAVVANYPYDKSFEHRVRGVRRTASTPTPDDKLFQKLAKVYSYAHGWMFQGWNCGDYFPDGITNGASWYSLSKGMQDFNYLHTNCFEITLELSCDKFPPEEELQREWLGNKEALIQFLEQVHQGIKGMVLDQNYNNLANAVISVSGINHDVTSGDHGDYFRLLLPGIYTVSATAPGYDPETVTVTVGPAEPTLVNFHLKRSGSSGGSSGGSSGDAHKSEVAHRFKDLGEENFKALVLIAFAQYLQQCPFEDHVKLVNEVTEFAKTCVADESAENCDKSLHTLFGDKLCTVATLRETYGEMADCCAKQEPERNECFLQHKDDNPNLPRLVRPEVDVMCTAFHDNEETFLKKYLYEIARRHPYFYAPELLFFAKRYKAAFTECCQAADKAACLLPKLDELRDEGKASSAKQRLKCASLQKFGERAFKAWAVARLSQRFPKAEFAEVSKLVTDLTKVHTECCHGDLLECADDRADLAKYICENQDSISSKLKECCEKPLLEKSHCIAEVENDEMPADLPSLAADFVESKDVCKNYAEAKDVFLGMFLYEYARRHPDYSVVLLLRLAKTYETTLEKCCAAADPHECYAKVFDEFKPLVEEPQNLIKQNCELFEQLGEYKFQNALLVRYTKKVPQVSTPTLVEVSRNLGKVGSKCCKHPEAKRMPCAEDYLSVVLNQLCVLHEKTPVSDRVTKCCTESLVNRRPCFSALEVDETYVPKEFNAETFTFHADICTLSEKERQIKKQTALVELVKHKPKATKEQLKAVMDDFAAFVEKCCKADDKETCFAEEGKKLVAASQAALGL

SEQ ID NO: 230 - protein, 995 aa, Artificial Sequence
  hCPN1 variant
VTFRHHRYDDLVRTLYKVQNECPGITRVYSIGRSVEGRHLYVLEFSDHPGIHEPLEPEVKYVGNMHGNEALGRELMLQLSEFLCEEFRNRNQRIVQLIQDTRIHILPSMNPDGYEVAAAQGPNQPGYLVGRNNANGVDLNRNFPDLNTYIYYNEKYGGPNHHLPLPDNWKSQVEPETRAVIRWMHSFNFVLSANLHGGAVVANYPYDKSFEHRVRGVRRTASTPTPDDKLFQKLAKVYSYAHGWMFQGWNCGDYFPDGITNGASWYSLSKGMQDFNYLHTNCFEITLELSCDKFPPEEELQREWLGNKEALIQFLEQVHQGIKGMVLDQNYNNLANAVISVSGINHDVTSGDHGDYFRLLLPGIYTVSATAPGYDPETVTVTVGPAEPTLVNFHLKRSGSSGGSSGGSSGDAHKSEVAHRFKDLGEENFKALVLIAFAQYLQQCPFEDHVKLVNEVTEFAKTCVADESAENCDKSLHTLFGDKLCTVATLRETYGEMADCCAKQEPERNECFLQHKDDNPNLPRLVRPEVDVMCTAFHDNEETFLKKYLYEIARRHPYFYAPELLFFAKRYKAAFTECCQAADKAACLLPKLDELRDEGKASSAKQRLKCASLQKFGERAFKAWAVARLSQRFPKAEFAEVSKLVTDLTKVHTECCHGDLLECADDRADLAKYICENQDSISSKLKECCEKPLLEKSHCIAEVENDEMPADLPSLAADFVESKDVCKNYAEAKDVFLGMFLYEYARRHPDYSVVLLLRLAKTYETTLEKCCAAADPHECYAKVFDEFKPLVEEPQNLIKQNCELFEQLGEYKFQNALLVRYTKKVPQVSTPTLVEVSRNLGKVGSKCCKHPEAKRMPCAEDYLSVVLNQLCVLHEKTPVSDRVTKCCTESLVNRRPCFSALEVDETYVPKEFNAETFTFHADICTLSEKERQIKKQTALVELVKHKPKATKEQLKAVMDDFAAFVEKCCKADDKETCFAEEGKKLVAASQAALGL

SEQ ID NO: 231 - protein, 995 aa, Artificial Sequence
  hCPN1 variant
VTFRHHRYDDLVRTLYKVQNECPGITRVYSIGRSVEGRHLYVLEFSDHPGIHEPLEPEVKYVGNMHGNEALGRELMLQLSEFLCEEFRNRNQRIVQLIQDTRIHILPSMNPDGYEVAAAQDPNKPGYLVGRNNANGVDLNRNFPDLNTYIYYNEKYGGPNHHLPLPDNWKSQVEPETRAVIRWMHSFNFVLSANLHGGAVVANYPYDKSFEHRVRGVRRTASTPTPDDKLFQKLAKVYSYAHGWMFQGWNCGDYFPDGITNGASWYSLSKGMQDFNYLHTNCFEITLELSCDKFPPEEELQREWLGNREALIQFLEQVHQGIKGMVLDENYNNLANAVISVSGINHDVTSGDHGDYFRLLLPGIYTVSATAPGYDPETVTVTVGPAEPTLVNFHLKRSGSSGGSSGGSSGDAHKSEVAHRFKDLGEENFKALVLIAFAQYLQQCPFEDHVKLVNEVTEFAKTCVADESAENCDKSLHTLFGDKLCTVATLRETYGEMADCCAKQEPERNECFLQHKDDNPNLPRLVRPEVDVMCTAFHDNEETFLKKYLYEIARRHPYFYAPELLFFAKRYKAAFTECCQAADKAACLLPKLDELRDEGKASSAKQRLKCASLQKFGERAFKAWAVARLSQRFPKAEFAEVSKLVTDLTKVHTECCHGDLLECADDRADLAKYICENQDSISSKLKECCEKPLLEKSHCIAEVENDEMPADLPSLAADFVESKDVCKNYAEAKDVFLGMFLYEYARRHPDYSVVLLLRLAKTYETTLEKCCAAADPHECYAKVFDEFKPLVEEPQNLIKQNCELFEQLGEYKFQNALLVRYTKKVPQVSTPTLVEVSRNLGKVGSKCCKHPEAKRMPCAEDYLSVVLNQLCVLHEKTPVSDRVTKCCTESLVNRRPCFSALEVDETYVPKEFNAETFTFHADICTLSEKERQIKKQTALVELVKHKPKATKEQLKAVMDDFAAFVEKCCKADDKETCFAEEGKKLVAASQAALGL

SEQ ID NO: 232 - protein, 995 aa, Artificial Sequence
  hCPN1 variant
VTFRHHRYDDLVRTLYKVQNECPGITRVYSIGRSVEGRHLYVLEFSDHPGIHEPLEPEVKYVGNMHGNEALGRELMLQLSEFLCEEFRNRNQRIVQLIQDTRIHILPSMNPDGYEVAAAQGPDKPGYLVGRNNANGVDLNRNFPDLNTYIYYNEKYGGPNHHLPLPDNWKSQVEPETRAVIRWMHSFNFVLSANLHGGAVVANYPYDKSFEHRVRGVRRTASTPTPDDKLFQKLAKVYSYAHGWMFQGWNCGDYFPDGITNGASWYSLSKGMQDFNYLHTNCFEITLELSCDKFPPEEELQREWLGNREALIQFLEQVHQGIKGMVLDENYNNLANAVISVSGINHDVTSGDHGDYFRLLLPGIYTVSATAPGYDPETVTVTVGPAEPTLVNFHLKRSGSSGGSSGGSSGDAHKSEVAHRFKDLGEENFKALVLIAFAQYLQQCPFEDHVKLVNEVTEFAKTCVADESAENCDKSLHTLFGDKLCTVATLRETYGEMADCCAKQEPERNECFLQHKDDNPNLPRLVRPEVDVMCTAFHDNEETFLKKYLYEIARRHPYFYAPELLFFAKRYKAAFTECCQAADKAACLLPKLDELRDEGKASSAKQRLKCASLQKFGERAFKAWAVARLSQRFPKAEFAEVSKLVTDLTKVHTECCHGDLLECADDRADLAKYICENQDSISSKLKECCEKPLLEKSHCIAEVENDEMPADLPSLAADFVESKDVCKNYAEAKDVFLGMFLYEYARRHPDYSVVLLLRLAKTYETTLEKCCAAADPHECYAKVFDEFKPLVEEPQNLIKQNCELFEQLGEYKFQNALLVRYTKKVPQVSTPTLVEVSRNLGKVGSKCCKHPEAKRMPCAEDYLSVVLNQLCVLHEKTPVSDRVTKCCTESLVNRRPCFSALEVDETYVPKEFNAETFTFHADICTLSEKERQIKKQTALVELVKHKPKATKEQLKAVMDDFAAFVEKCCKADDKETCFAEEGKKLVAASQAALGL

SEQ ID NO: 233 - protein, 995 aa, Artificial Sequence
  hCPN1 variant
VTFRHHRYDDLVRTLYKVQNECPGITRVYSIGRSVEGRHLYVLEFSDHPGIHEPLEPEVKYVGNMHGNEALGRELMLQLSEFLCEEFRNRNQRIVQLIQDTRIHILPSMNPDGYEVAAAQDPDKPGYLVGRNNANGVDLNRNFPDLNTYIYYNEKYGGPNHHLPLPDNWKSQVEPETRAVIRWMHSFNFVLSANLHGGAVVANYPYDKSFEHRVRGVRRTASTPTPDDKLFQKLAKVYSYAHGWMFQGWNCGDYFPDGITNGASWYSLSKGMQDFNYLHTNCFEITLELSCDKFPPEEELQREWLGNREALIQFLEQVHQGIKGMVLDENYNNLANAVISVSGINHDVTSGDHGDYFRLLLPGIYTVSATAPGYDPETVTVTVGPAEPTLVNFHLKRSGSSGGSSGGSSGDAHKSEVAHRFKDLGEENFKALVLIAFAQYLQQCPFEDHVKLVNEVTEFAKTCVADESAENCDKSLHTLFGDKLCTVATLRETYGEMADCCAKQEPERNECFLQHKDDNPNLPRLVRPEVDVMCTAFHDNEETFLKKYLYEIARRHPYFYAPELLFFAKRYKAAFTECCQAADKAACLLPKLDELRDEGKASSAKQRLKCASLQKFGERAFKAWAVARLSQRFPKAEFAEVSKLVTDLTKVHTECCHGDLLECADDRADLAKYICENQDSISSKLKECCEKPLLEKSHCIAEVENDEMPADLPSLAADFVESKDVCKNYAEAKDVFLGMFLYEYARRHPDYSVVLLLRLAKTYETTLEKCCAAADPHECYAKVFDEFKPLVEEPQNLIKQNCELFEQLGEYKFQNALLVRYTKKVPQVSTPTLVEVSRNLGKVGSKCCKHPEAKRMPCAEDYLSVVLNQLCVLHEKTPVSDRVTKCCTESLVNRRPCFSALEVDETYVPKEFNAETFTFHADICTLSEKERQIKKQTALVELVKHKPKATKEQLKAVMDDFAAFVEKCCKADDKETCFAEEGKKLVAASQAALGL

SEQ ID NO: 234 - protein, 995 aa, Artificial Sequence
  hCPN1 variant
VTFRHHRYDDLVRTLYKVQNECPGITRVYSIGRSVEGRHLYVLEFSDHPGIHEPLEPEVKYVGNMHGNEALGRELMLQLSEFLCEEFRNRNQRIVQLIQDTRIHILPSMNPDGYEVAAAQGANKPGYLVGRNNANGVDLNRNFPDLNTYIYYNEKYGGPNHHLPLPDNWKSQVEPETRAVIRWMHSFNFVLSANLHGGAVVANYPYDKSFEHRVRGVRRTASTPTPDDKLFQKLAKVYSYAHGWMFQGWNCGDYFPDGITNGASWYSLSKGMQDFNYLHTNCFEITLELSCDKFPPEEELQREWLGNREALIQFLEQVHQGIKGMVLDENYNNLANAVISVSGINHDVTSGDHGDYFRLLLPGIYTVSATAPGYDPETVTVTVGPAEPTLVNFHLKRSGSSGGSSGGSSGDAHKSEVAHRFKDLGEENFKALVLIAFAQYLQQCPFEDHVKLVNEVTEFAKTCVADESAENCDKSLHTLFGDKLCTVATLRETYGEMADCCAKQEPERNECFLQHKDDNPNLPRLVRPEVDVMCTAFHDNEETFLKKYLYEIARRHPYFYAPELLFFAKRYKAAFTECCQAADKAACLLPKLDELRDEGKASSAKQRLKCASLQKFGERAFKAWAVARLSQRFPKAEFAEVSKLVTDLTKVHTECCHGDLLECADDRADLAKYICENQDSISSKLKECCEKPLLEKSHCIAEVENDEMPADLPSLAADFVESKDVCKNYAEAKDVFLGMFLYEYARRHPDYSVVLLLRLAKTYETTLEKCCAAADPHECYAKVFDEFKPLVEEPQNLIKQNCELFEQLGEYKFQNALLVRYTKKVPQVSTPTLVEVSRNLGKVGSKCCKHPEAKRMPCAEDYLSVVLNQLCVLHEKTPVSDRVTKCCTESLVNRRPCFSALEVDETYVPKEFNAETFTFHADICTLSEKERQIKKQTALVELVKHKPKATKEQLKAVMDDFAAFVEKCCKADDKETCFAEEGKKLVAASQAALGL

SEQ ID NO: 235 - protein, 995 aa, Artificial Sequence
  hCPN1 variant
VTFRHHRYDDLVRTLYKVQNECPGITRVYSIGRSVEGRHLYVLEFSDHPGIHEPLEPEVKYVGNMHGNEALGRELMLQLSEFLCEEFRNRNQRIVQLIQDTRIHILPSMNPDGYEVAAAQGRNKPGYLVGRNNANGVDLNRNFPDLNTYIYYNEKYGGPNHHLPLPDNWKSQVEPETRAVIRWMHSFNFVLSANLHGGAVVANYPYDKSFEHRVRGVRRTASTPTPDDKLFQKLAKVYSYAHGWMFQGWNCGDYFPDGITNGASWYSLSKGMQDFNYLHTNCFEITLELSCDKFPPEEELQREWLGNREALIQFLEQVHQGIKGMVLDENYNNLANAVISVSGINHDVTSGDHGDYFRLLLPGIYTVSATAPGYDPETVTVTVGPAEPTLVNFHLKRSGSSGGSSGGSSGDAHKSEVAHRFKDLGEENFKALVLIAFAQYLQQCPFEDHVKLVNEVTEFAKTCVADESAENCDKSLHTLFGDKLCTVATLRETYGEMADCCAKQEPERNECFLQHKDDNPNLPRLVRPEVDVMCTAFHDNEETFLKKYLYEIARRHPYFYAPELLFFAKRYKAAFTECCQAADKAACLLPKLDELRDEGKASSAKQRLKCASLQKFGERAFKAWAVARLSQRFPKAEFAEVSKLVTDLTKVHTECCHGDLLECADDRADLAKYICENQDSISSKLKECCEKPLLEKSHCIAEVENDEMPADLPSLAADFVESKDVCKNYAEAKDVFLGMFLYEYARRHPDYSVVLLLRLAKTYETTLEKCCAAADPHECYAKVFDEFKPLVEEPQNLIKQNCELFEQLGEYKFQNALLVRYTKKVPQVSTPTLVEVSRNLGKVGSKCCKHPEAKRMPCAEDYLSVVLNQLCVLHEKTPVSDRVTKCCTESLVNRRPCFSALEVDETYVPKEFNAETFTFHADICTLSEKERQIKKQTALVELVKHKPKATKEQLKAVMDDFAAFVEKCCKADDKETCFAEEGKKLVAASQAALGL

SEQ ID NO: 236 - protein, 995 aa, Artificial Sequence
  hCPN1 variant
VTFRHHRYDDLVRTLYKVQNECPGITRVYSIGRSVEGRHLYVLEFSDHPGIHEPLEPEVKYVGNMHGNEALGRELMLQLSEFLCEEFRNRNQRIVQLIQDTRIHILPSMNPDGYEVAAAQGPNIPGYLVGRNNANGVDLNRNFPDLNTYIYYNEKYGGPNHHLPLPDNWKSQVEPETRAVIRWMHSFNFVLSANLHGGAVVANYPYDKSFEHRVRGVRRTASTPTPDDKLFQKLAKVYSYAHGWMFQGWNCGDYFPDGITNGASWYSLSKGMQDFNYLHTNCFEITLELSCDKFPPEEELQREWLGNREALIQFLEQVHQGIKGMVLDENYNNLANAVISVSGINHDVTSGDHGDYFRLLLPGIYTVSATAPGYDPETVTVTVGPAEPTLVNFHLKRSGSSGGSSGGSSGDAHKSEVAHRFKDLGEENFKALVLIAFAQYLQQCPFEDHVKLVNEVTEFAKTCVADESAENCDKSLHTLFGDKLCTVATLRETYGEMADCCAKQEPERNECFLQHKDDNPNLPRLVRPEVDVMCTAFHDNEETFLKKYLYEIARRHPYFYAPELLFFAKRYKAAFTECCQAADKAACLLPKLDELRDEGKASSAKQRLKCASLQKFGERAFKAWAVARLSQRFPKAEFAEVSKLVTDLTKVHTECCHGDLLECADDRADLAKYICENQDSISSKLKECCEKPLLEKSHCIAEVENDEMPADLPSLAADFVESKDVCKNYAEAKDVFLGMFLYEYARRHPDYSVVLLLRLAKTYETTLEKCCAAADPHECYAKVFDEFKPLVEEPQNLIKQNCELFEQLGEYKFQNALLVRYTKKVPQVSTPTLVEVSRNLGKVGSKCCKHPEAKRMPCAEDYLSVVLNQLCVLHEKTPVSDRVTKCCTESLVNRRPCFSALEVDETYVPKEFNAETFTFHADICTLSEKERQIKKQTALVELVKHKPKATKEQLKAVMDDFAAFVEKCCKADDKETCFAEEGKKLVAASQAALGL

SEQ ID NO: 237 - protein, 995 aa, Artificial Sequence
  hCPN1 variant
VTFRHHRYDDLVRTLYKVQNECPGITRVYSIGRSVEGRHLYVLEFSDHPGIHEPLEPEVKYVGNMHGNEALGRELMLQLSEFLCEEFRNRNQRIVQLIQDTRIHILPSMNPDGYEVAAAQDPDIPGYLVGRNNANGVDLNRNFPDLNTYIYYNEKYGGPNHHLPLPDNWKSQVEPETRAVIRWMHSFNFVLSANLHGGAVVANYPYDKSFEHRVRGVRRTASTPTPDDKLFQKLAKVYSYAHGWMFQGWNCGDYFPDGITNGASWYSLSKGMQDFNYLHTNCFEITLELSCDKFPPEEELQREWLGNREALIQFLEQVHQGIKGMVLDENYNNLANAVISVSGINHDVTSGDHGDYFRLLLPGIYTVSATAPGYDPETVTVTVGPAEPTLVNFHLKRSGSSGGSSGGSSGDAHKSEVAHRFKDLGEENFKALVLIAFAQYLQQCPFEDHVKLVNEVTEFAKTCVADESAENCDKSLHTLFGDKLCTVATLRETYGEMADCCAKQEPERNECFLQHKDDNPNLPRLVRPEVDVMCTAFHDNEETFLKKYLYEIARRHPYFYAPELLFFAKRYKAAFTECCQAADKAACLLPKLDELRDEGKASSAKQRLKCASLQKFGERAFKAWAVARLSQRFPKAEFAEVSKLVTDLTKVHTECCHGDLLECADDRADLAKYICENQDSISSKLKECCEKPLLEKSHCIAEVENDEMPADLPSLAADFVESKDVCKNYAEAKDVFLGMFLYEYARRHPDYSVVLLLRLAKTYETTLEKCCAAADPHECYAKVFDEFKPLVEEPQNLIKQNCELFEQLGEYKFQNALLVRYTKKVPQVSTPTLVEVSRNLGKVGSKCCKHPEAKRMPCAEDYLSVVLNQLCVLHEKTPVSDRVTKCCTESLVNRRPCFSALEVDETYVPKEFNAETFTFHADICTLSEKERQIKKQTALVELVKHKPKATKEQLKAVMDDFAAFVEKCCKADDKETCFAEEGKKLVAASQAALGL

SEQ ID NO: 238 - protein, 995 aa, Artificial Sequence
  hCPN1 variant
VTFRHHRYDDLVRTLYKVQNECPGITRVYSIGRSVEGRHLYVLEFSDHPGIHEPLEPEVKYVGNMHGNEALGRELMLQLSEFLCEEFRNRNQRIVQLIQDTRIHILPSMNPDGYEVAAAQGPNKSGYLVGRNNANGVDLNRNFPDLNTYIYYNEKYGGPNHHLPLPDNWKSQVEPETRAVIRWMHSFNFVLSANLHGGAVVANYPYDKSFEHRVRGVRRTASTPTPDDKLFQKLAKVYSYAHGWMFQGWNCGDYFPDGITNGASWYSLSKGMQDFNYLHTNCFEITLELSCDKFPPEEELQREWLGNREALIQFLEQVHQGIKGMVLDENYNNLANAVISVSGINHDVTSGDHGDYFRLLLPGIYTVSATAPGYDPETVTVTVGPAEPTLVNFHLKRSGSSGGSSGGSSGDAHKSEVAHRFKDLGEENFKALVLIAFAQYLQQCPFEDHVKLVNEVTEFAKTCVADESAENCDKSLHTLFGDKLCTVATLRETYGEMADCCAKQEPERNECFLQHKDDNPNLPRLVRPEVDVMCTAFHDNEETFLKKYLYEIARRHPYFYAPELLFFAKRYKAAFTECCQAADKAACLLPKLDELRDEGKASSAKQRLKCASLQKFGERAFKAWAVARLSQRFPKAEFAEVSKLVTDLTKVHTECCHGDLLECADDRADLAKYICENQDSISSKLKECCEKPLLEKSHCIAEVENDEMPADLPSLAADFVESKDVCKNYAEAKDVFLGMFLYEYARRHPDYSVVLLLRLAKTYETTLEKCCAAADPHECYAKVFDEFKPLVEEPQNLIKQNCELFEQLGEYKFQNALLVRYTKKVPQVSTPTLVEVSRNLGKVGSKCCKHPEAKRMPCAEDYLSVVLNQLCVLHEKTPVSDRVTKCCTESLVNRRPCFSALEVDETYVPKEFNAETFTFHADICTLSEKERQIKKQTALVELVKHKPKATKEQLKAVMDDFAAFVEKCCKADDKETCFAEEGKKLVAASQAALGL

SEQ ID NO: 239 - protein, 995 aa, Artificial Sequence
  hCPN1 variant
VTFRHHRYDDLVRTLYKVQNECPGITRVYSIGRSVEGRHLYVLEFSDHPGIHEPLEPEVKYVGNMHGNEALGRELMLQLSEFLCEEFRNRNQRIVQLIQDTRIHILPSMNPDGYEVAAAQGGNKPGYLVGRNNANGVDLNRNFPDLNTYIYYNEKYGGPNHHLPLPDNWKSQVEPETRAVIRWMHSFNFVLSANLHGGAVVANYPYDKSFEHRVRGVRRTASTPTPDDKLFQKLAKVYSYAHGWMFQGWNCGDYFPDGITNGASWYSLSKGMQDFNYLHTNCFEITLELSCDKFPPEEELQREWLGNREALIQFLEQVHQGIKGMVLDENYNNLANAVISVSGINHDVTSGDHGDYFRLLLPGIYTVSATAPGYDPETVTVTVGPAEPTLVNFHLKRSGSSGGSSGGSSGDAHKSEVAHRFKDLGEENFKALVLIAFAQYLQQCPFEDHVKLVNEVTEFAKTCVADESAENCDKSLHTLFGDKLCTVATLRETYGEMADCCAKQEPERNECFLQHKDDNPNLPRLVRPEVDVMCTAFHDNEETFLKKYLYEIARRHPYFYAPELLFFAKRYKAAFTECCQAADKAACLLPKLDELRDEGKASSAKQRLKCASLQKFGERAFKAWAVARLSQRFPKAEFAEVSKLVTDLTKVHTECCHGDLLECADDRADLAKYICENQDSISSKLKECCEKPLLEKSHCIAEVENDEMPADLPSLAADFVESKDVCKNYAEAKDVFLGMFLYEYARRHPDYSVVLLLRLAKTYETTLEKCCAAADPHECYAKVFDEFKPLVEEPQNLIKQNCELFEQLGEYKFQNALLVRYTKKVPQVSTPTLVEVSRNLGKVGSKCCKHPEAKRMPCAEDYLSVVLNQLCVLHEKTPVSDRVTKCCTESLVNRRPCFSALEVDETYVPKEFNAETFTFHADICTLSEKERQIKKQTALVELVKHKPKATKEQLKAVMDDFAAFVEKCCKADDKETCFAEEGKKLVAASQAALGL

SEQ ID NO: 240 - protein, 995 aa, Artificial Sequence
  hCPN1 variant
VTFRHHRYDDLVRTLYKVQNECPGITRVYSIGRSVEGRHLYVLEFSDHPGIHEPLEPEVKYVGNMHGNEALGRELMLQLSEFLCEEFRNRNQRIVQLIQDTRIHILPSMNPDGYEVAAAQGPNSPGYLVGRNNANGVDLNRNFPDLNTYIYYNEKYGGPNHHLPLPDNWKSQVEPETRAVIRWMHSFNFVLSANLHGGAVVANYPYDKSFEHRVRGVRRTASTPTPDDKLFQKLAKVYSYAHGWMFQGWNCGDYFPDGITNGASWYSLSKGMQDFNYLHTNCFEITLELSCDKFPPEEELQREWLGNREALIQFLEQVHQGIKGMVLDENYNNLANAVISVSGINHDVTSGDHGDYFRLLLPGIYTVSATAPGYDPETVTVTVGPAEPTLVNFHLKRSGSSGGSSGGSSGDAHKSEVAHRFKDLGEENFKALVLIAFAQYLQQCPFEDHVKLVNEVTEFAKTCVADESAENCDKSLHTLFGDKLCTVATLRETYGEMADCCAKQEPERNECFLQHKDDNPNLPRLVRPEVDVMCTAFHDNEETFLKKYLYEIARRHPYFYAPELLFFAKRYKAAFTECCQAADKAACLLPKLDELRDEGKASSAKQRLKCASLQKFGERAFKAWAVARLSQRFPKAEFAEVSKLVTDLTKVHTECCHGDLLECADDRADLAKYICENQDSISSKLKECCEKPLLEKSHCIAEVENDEMPADLPSLAADFVESKDVCKNYAEAKDVFLGMFLYEYARRHPDYSVVLLLRLAKTYETTLEKCCAAADPHECYAKVFDEFKPLVEEPQNLIKQNCELFEQLGEYKFQNALLVRYTKKVPQVSTPTLVEVSRNLGKVGSKCCKHPEAKRMPCAEDYLSVVLNQLCVLHEKTPVSDRVTKCCTESLVNRRPCFSALEVDETYVPKEFNAETFTFHADICTLSEKERQIKKQTALVELVKHKPKATKEQLKAVMDDFAAFVEKCCKADDKETCFAEEGKKLVAASQAALGL

SEQ ID NO: 241 - protein, 995 aa, Artificial Sequence
  hCPN1 variant
VTFRHHRYDDLVRTLYKVQNECPGITRVYSIGRSVEGRHLYVLEFSDHPGIHEPLEPEVKYVGNMHGNEALGRELMLQLSEFLCEEFRNRNQRIVQLIQDTRIHILPSMNPDGYEVAAAQGPNGPGYLVGRNNANGVDLNRNFPDLNTYIYYNEKYGGPNHHLPLPDNWKSQVEPETRAVIRWMHSFNFVLSANLHGGAVVANYPYDKSFEHRVRGVRRTASTPTPDDKLFQKLAKVYSYAHGWMFQGWNCGDYFPDGITNGASWYSLSKGMQDFNYLHTNCFEITLELSCDKFPPEEELQREWLGNREALIQFLEQVHQGIKGMVLDENYNNLANAVISVSGINHDVTSGDHGDYFRLLLPGIYTVSATAPGYDPETVTVTVGPAEPTLVNFHLKRSGSSGGSSGGSSGDAHKSEVAHRFKDLGEENFKALVLIAFAQYLQQCPFEDHVKLVNEVTEFAKTCVADESAENCDKSLHTLFGDKLCTVATLRETYGEMADCCAKQEPERNECFLQHKDDNPNLPRLVRPEVDVMCTAFHDNEETFLKKYLYEIARRHPYFYAPELLFFAKRYKAAFTECCQAADKAACLLPKLDELRDEGKASSAKQRLKCASLQKFGERAFKAWAVARLSQRFPKAEFAEVSKLVTDLTKVHTECCHGDLLECADDRADLAKYICENQDSISSKLKECCEKPLLEKSHCIAEVENDEMPADLPSLAADFVESKDVCKNYAEAKDVFLGMFLYEYARRHPDYSVVLLLRLAKTYETTLEKCCAAADPHECYAKVFDEFKPLVEEPQNLIKQNCELFEQLGEYKFQNALLVRYTKKVPQVSTPTLVEVSRNLGKVGSKCCKHPEAKRMPCAEDYLSVVLNQLCVLHEKTPVSDRVTKCCTESLVNRRPCFSALEVDETYVPKEFNAETFTFHADICTLSEKERQIKKQTALVELVKHKPKATKEQLKAVMDDFAAFVEKCCKADDKETCFAEEGKKLVAASQAALGL

SEQ ID NO: 242 - protein, 995 aa, Artificial Sequence
  hCPN1 variant
VTFRHHRYDDLVRTLYKVQNECPGITRVYSIGRSVEGRHLYVLEFSDHPGIHEPLEPEVKYVGNMHGNEALGRELMLQLSEFLCEEFRNRNQRIVQLIQDTRIHILPSMNPDGYEVAAAQGPNKNGYLVGRNNANGVDLNRNFPDLNTYIYYNEKYGGPNHHLPLPDNWKSQVEPETRAVIRWMHSFNFVLSANLHGGAVVANYPYDKSFEHRVRGVRRTASTPTPDDKLFQKLAKVYSYAHGWMFQGWNCGDYFPDGITNGASWYSLSKGMQDFNYLHTNCFEITLELSCDKFPPEEELQREWLGNREALIQFLEQVHQGIKGMVLDENYNNLANAVISVSGINHDVTSGDHGDYFRLLLPGIYTVSATAPGYDPETVTVTVGPAEPTLVNFHLKRSGSSGGSSGGSSGDAHKSEVAHRFKDLGEENFKALVLIAFAQYLQQCPFEDHVKLVNEVTEFAKTCVADESAENCDKSLHTLFGDKLCTVATLRETYGEMADCCAKQEPERNECFLQHKDDNPNLPRLVRPEVDVMCTAFHDNEETFLKKYLYEIARRHPYFYAPELLFFAKRYKAAFTECCQAADKAACLLPKLDELRDEGKASSAKQRLKCASLQKFGERAFKAWAVARLSQRFPKAEFAEVSKLVTDLTKVHTECCHGDLLECADDRADLAKYICENQDSISSKLKECCEKPLLEKSHCIAEVENDEMPADLPSLAADFVESKDVCKNYAEAKDVFLGMFLYEYARRHPDYSVVLLLRLAKTYETTLEKCCAAADPHECYAKVFDEFKPLVEEPQNLIKQNCELFEQLGEYKFQNALLVRYTKKVPQVSTPTLVEVSRNLGKVGSKCCKHPEAKRMPCAEDYLSVVLNQLCVLHEKTPVSDRVTKCCTESLVNRRPCFSALEVDETYVPKEFNAETFTFHADICTLSEKERQIKKQTALVELVKHKPKATKEQLKAVMDDFAAFVEKCCKADDKETCFAEEGKKLVAASQAALGL

SEQ ID NO: 243 - protein, 995 aa, Artificial Sequence
  hCPN1 variant
VTFRHHRYDDLVRTLYKVQNECPGITRVYSIGRSVEGRHLYVLEFSDHPGIHEPLEPEVKYVGNMHGNEALGRELMLQLSEFLCEEFRNRNQRIVQLIQDTRIHILPSMNPDGYEVAAAQGPNKGGYLVGRNNANGVDLNRNFPDLNTYIYYNEKYGGPNHHLPLPDNWKSQVEPETRAVIRWMHSFNFVLSANLHGGAVVANYPYDKSFEHRVRGVRRTASTPTPDDKLFQKLAKVYSYAHGWMFQGWNCGDYFPDGITNGASWYSLSKGMQDFNYLHTNCFEITLELSCDKFPPEEELQREWLGNREALIQFLEQVHQGIKGMVLDENYNNLANAVISVSGINHDVTSGDHGDYFRLLLPGIYTVSATAPGYDPETVTVTVGPAEPTLVNFHLKRSGSSGGSSGGSSGDAHKSEVAHRFKDLGEENFKALVLIAFAQYLQQCPFEDHVKLVNEVTEFAKTCVADESAENCDKSLHTLFGDKLCTVATLRETYGEMADCCAKQEPERNECFLQHKDDNPNLPRLVRPEVDVMCTAFHDNEETFLKKYLYEIARRHPYFYAPELLFFAKRYKAAFTECCQAADKAACLLPKLDELRDEGKASSAKQRLKCASLQKFGERAFKAWAVARLSQRFPKAEFAEVSKLVTDLTKVHTECCHGDLLECADDRADLAKYICENQDSISSKLKECCEKPLLEKSHCIAEVENDEMPADLPSLAADFVESKDVCKNYAEAKDVFLGMFLYEYARRHPDYSVVLLLRLAKTYETTLEKCCAAADPHECYAKVFDEFKPLVEEPQNLIKQNCELFEQLGEYKFQNALLVRYTKKVPQVSTPTLVEVSRNLGKVGSKCCKHPEAKRMPCAEDYLSVVLNQLCVLHEKTPVSDRVTKCCTESLVNRRPCFSALEVDETYVPKEFNAETFTFHADICTLSEKERQIKKQTALVELVKHKPKATKEQLKAVMDDFAAFVEKCCKADDKETCFAEEGKKLVAASQAALGL

SEQ ID NO: 244 - protein, 995 aa, Artificial Sequence
  hCPN1 variant
VTFRHHRYDDLVRTLYKVQNECPGITRVYSIGRSVEGRHLYVLEFSDHPGIHEPLEPEVKYVGNMHGNEALGRELMLQLSEFLCEEFRNRNQRIVQLIQDTRIHILPSMNPDGYEVAAAQGPNKPGYLVGRNNANGVDLNRNFPDLNTYIYYNEKYGGPNHHLPLPDNWKSQVEPETRAVIRWMHSFNFVLSANLHGGAVVANYPYDKSFEHRVRGVRRTASTPTPDDKLFQKLAKVYSYAHGWMFQGWNCGDYFPDGITNGASWYSLSKGMQDFNYLHTNCFEITLELSCDKFPPQEELQREWLGNREALIQFLEQVHQGIKGMVLDENYNNLANAVISVSGINHDVTSGDHGDYFRLLLPGIYTVSATAPGYDPETVTVTVGPAEPTLVNFHLKRSGSSGGSSGGSSGDAHKSEVAHRFKDLGEENFKALVLIAFAQYLQQCPFEDHVKLVNEVTEFAKTCVADESAENCDKSLHTLFGDKLCTVATLRETYGEMADCCAKQEPERNECFLQHKDDNPNLPRLVRPEVDVMCTAFHDNEETFLKKYLYEIARRHPYFYAPELLFFAKRYKAAFTECCQAADKAACLLPKLDELRDEGKASSAKQRLKCASLQKFGERAFKAWAVARLSQRFPKAEFAEVSKLVTDLTKVHTECCHGDLLECADDRADLAKYICENQDSISSKLKECCEKPLLEKSHCIAEVENDEMPADLPSLAADFVESKDVCKNYAEAKDVFLGMFLYEYARRHPDYSVVLLLRLAKTYETTLEKCCAAADPHECYAKVFDEFKPLVEEPQNLIKQNCELFEQLGEYKFQNALLVRYTKKVPQVSTPTLVEVSRNLGKVGSKCCKHPEAKRMPCAEDYLSVVLNQLCVLHEKTPVSDRVTKCCTESLVNRRPCFSALEVDETYVPKEFNAETFTFHADICTLSEKERQIKKQTALVELVKHKPKATKEQLKAVMDDFAAFVEKCCKADDKETCFAEEGKKLVAASQAALGL

SEQ ID NO: 245 - protein, 995 aa, Artificial Sequence
  hCPN1 variant
VTFRHHRYDDLVRTLYKVQNECPGITRVYSIGRSVEGRHLYVLEFSDHPGIHEPLEPEVKYVGNMHGNEALGRELMLQLSEFLCEEFRNRNQRIVQLIQDTRIHILPSMNPDGYEVAAAQGPNKPGYLVGRNNANGVDLNRNFPDLNTYIYYNEKYGGPNHHLPLPDNWKSQVEPETRAFIRWMHSFNFVLSANLHGGAVVANYPYDKSFEHRVRGVRRTASTPTPDDKLFQKLAKVYSYAHGWMFQGWNCGDYFPDGITNGASWYSLSKGMQDFNYLHTNCFEITLELSCDKFPPEEELQREWLGNREALIQFLEQVHQGIKGMVLDENYNNLANAVISVSGINHDVTSGDHGDYFRLLLPGIYTVSATAPGYDPETVTVTVGPAEPTLVNFHLKRSGSSGGSSGGSSGDAHKSEVAHRFKDLGEENFKALVLIAFAQYLQQCPFEDHVKLVNEVTEFAKTCVADESAENCDKSLHTLFGDKLCTVATLRETYGEMADCCAKQEPERNECFLQHKDDNPNLPRLVRPEVDVMCTAFHDNEETFLKKYLYEIARRHPYFYAPELLFFAKRYKAAFTECCQAADKAACLLPKLDELRDEGKASSAKQRLKCASLQKFGERAFKAWAVARLSQRFPKAEFAEVSKLVTDLTKVHTECCHGDLLECADDRADLAKYICENQDSISSKLKECCEKPLLEKSHCIAEVENDEMPADLPSLAADFVESKDVCKNYAEAKDVFLGMFLYEYARRHPDYSVVLLLRLAKTYETTLEKCCAAADPHECYAKVFDEFKPLVEEPQNLIKQNCELFEQLGEYKFQNALLVRYTKKVPQVSTPTLVEVSRNLGKVGSKCCKHPEAKRMPCAEDYLSVVLNQLCVLHEKTPVSDRVTKCCTESLVNRRPCFSALEVDETYVPKEFNAETFTFHADICTLSEKERQIKKQTALVELVKHKPKATKEQLKAVMDDFAAFVEKCCKADDKETCFAEEGKKLVAASQAALGL

SEQ ID NO: 246 - protein, 995 aa, Artificial Sequence
  hCPN1 variant
VTFRHHRYDDLVRTLYKVQNECPGITRVYSIGRSVEGRHLYVLEFSDHPGIHEPLEPEVKYVGNMHGNEALGRELMLQLSEFLCEEFRNRNQRIVQLIQDTRIHILPSMNPDGYEVAAAQGPNKPGYLVGRNNANGVDLNRNFPDLNTYIYYNEKYGGPNHHLPLPDNWKSQVEPETRAVIRWMHSFNFVLAANLHGGAVVANYPYDKSFEHRVRGVRRTASTPTPDDKLFQKLAKVYSYAHGWMFQGWNCGDYFPDGITNGASWYSLSKGMQDFNYLHTNCFEITLELSCDKFPPEEELQREWLGNREALIQFLEQVHQGIKGMVLDENYNNLANAVISVSGINHDVTSGDHGDYFRLLLPGIYTVSATAPGYDPETVTVTVGPAEPTLVNFHLKRSGSSGGSSGGSSGDAHKSEVAHRFKDLGEENFKALVLIAFAQYLQQCPFEDHVKLVNEVTEFAKTCVADESAENCDKSLHTLFGDKLCTVATLRETYGEMADCCAKQEPERNECFLQHKDDNPNLPRLVRPEVDVMCTAFHDNEETFLKKYLYEIARRHPYFYAPELLFFAKRYKAAFTECCQAADKAACLLPKLDELRDEGKASSAKQRLKCASLQKFGERAFKAWAVARLSQRFPKAEFAEVSKLVTDLTKVHTECCHGDLLECADDRADLAKYICENQDSISSKLKECCEKPLLEKSHCIAEVENDEMPADLPSLAADFVESKDVCKNYAEAKDVFLGMFLYEYARRHPDYSVVLLLRLAKTYETTLEKCCAAADPHECYAKVFDEFKPLVEEPQNLIKQNCELFEQLGEYKFQNALLVRYTKKVPQVSTPTLVEVSRNLGKVGSKCCKHPEAKRMPCAEDYLSVVLNQLCVLHEKTPVSDRVTKCCTESLVNRRPCFSALEVDETYVPKEFNAETFTFHADICTLSEKERQIKKQTALVELVKHKPKATKEQLKAVMDDFAAFVEKCCKADDKETCFAEEGKKLVAASQAALGL

SEQ ID NO: 247 - protein, 995 aa, Artificial Sequence
  hCPN1 variant
VTFRHHRYDDLVRTLYKVQNECPGITRVYSIGRSVEGRHLYVLEFSDHPGIHEPLEPEVKYVGNMHGNEALGRELMLQLSEFLCEEFRNRNQRIVQLIQDTRIHILPSMNPDGYEVAAAQGPNKPGYLVGRNNANGVDLNRNFPDLNTYIYYNEKYGGPNHHLPLPDNWKSQVEPETRAVIRWMHSFNFVLSANLHGGAVVANYPYDKSFEHRVRGVRRTASTPTPDDKLFQKLAKVYSYAHGWMFQGWNCGDYFPDGITNGASWYSLSKGMQDFVYLHTNCFEITLELSCDKFPPEEELQREWLGNREALIQFLEQVHQGIKGMVLDENYNNLANAVISVSGINHDVTSGDHGDYFRLLLPGIYTVSATAPGYDPETVTVTVGPAEPTLVNFHLKRSGSSGGSSGGSSGDAHKSEVAHRFKDLGEENFKALVLIAFAQYLQQCPFEDHVKLVNEVTEFAKTCVADESAENCDKSLHTLFGDKLCTVATLRETYGEMADCCAKQEPERNECFLQHKDDNPNLPRLVRPEVDVMCTAFHDNEETFLKKYLYEIARRHPYFYAPELLFFAKRYKAAFTECCQAADKAACLLPKLDELRDEGKASSAKQRLKCASLQKFGERAFKAWAVARLSQRFPKAEFAEVSKLVTDLTKVHTECCHGDLLECADDRADLAKYICENQDSISSKLKECCEKPLLEKSHCIAEVENDEMPADLPSLAADFVESKDVCKNYAEAKDVFLGMFLYEYARRHPDYSVVLLLRLAKTYETTLEKCCAAADPHECYAKVFDEFKPLVEEPQNLIKQNCELFEQLGEYKFQNALLVRYTKKVPQVSTPTLVEVSRNLGKVGSKCCKHPEAKRMPCAEDYLSVVLNQLCVLHEKTPVSDRVTKCCTESLVNRRPCFSALEVDETYVPKEFNAETFTFHADICTLSEKERQIKKQTALVELVKHKPKATKEQLKAVMDDFAAFVEKCCKADDKETCFAEEGKKLVAASQAALGL

SEQ ID NO: 248 - protein, 995 aa, Artificial Sequence
  hCPN1 variant
VTFRHHRYDDLVRTLYKVQNECPGITRVYSIGRSVEGRHLYVLEFSDHPGIHEPLEPEVKYVGNMHGNEALGRELMLQLSEFLCEEFRNRNQRIVQLIQDTRIHILPSMNPDGYEVAAAQGPNKPGYLVGRNNANGVDLNRNFPDLNTYIYYNEKYGGPNHHLPLPDNWKSQVEPETRAVIRWMHSFNFVLSANLHGGAVVANYPYDKSFEHRVRGVRRTASTPTPDDKLFQKLAKVYSYAHGWMFQGWNCGDYFPDGITNGASWYSLSKGMQDFNYLHTNCFIITLELSCDKFPPEEELQREWLGNREALIQFLEQVHQGIKGMVLDENYNNLANAVISVSGINHDVTSGDHGDYFRLLLPGIYTVSATAPGYDPETVTVTVGPAEPTLVNFHLKRSGSSGGSSGGSSGDAHKSEVAHRFKDLGEENFKALVLIAFAQYLQQCPFEDHVKLVNEVTEFAKTCVADESAENCDKSLHTLFGDKLCTVATLRETYGEMADCCAKQEPERNECFLQHKDDNPNLPRLVRPEVDVMCTAFHDNEETFLKKYLYEIARRHPYFYAPELLFFAKRYKAAFTECCQAADKAACLLPKLDELRDEGKASSAKQRLKCASLQKFGERAFKAWAVARLSQRFPKAEFAEVSKLVTDLTKVHTECCHGDLLECADDRADLAKYICENQDSISSKLKECCEKPLLEKSHCIAEVENDEMPADLPSLAADFVESKDVCKNYAEAKDVFLGMFLYEYARRHPDYSVVLLLRLAKTYETTLEKCCAAADPHECYAKVFDEFKPLVEEPQNLIKQNCELFEQLGEYKFQNALLVRYTKKVPQVSTPTLVEVSRNLGKVGSKCCKHPEAKRMPCAEDYLSVVLNQLCVLHEKTPVSDRVTKCCTESLVNRRPCFSALEVDETYVPKEFNAETFTFHADICTLSEKERQIKKQTALVELVKHKPKATKEQLKAVMDDFAAFVEKCCKADDKETCFAEEGKKLVAASQAALGL

SEQ ID NO: 249 - protein, 995 aa, Artificial Sequence
  hCPN1 variant
VTFRHHRYDDLVRTLYKVQNECPGITRVYSIGRSVEGRHLYVLEFSDHPGIHEPLEPEVFYVGNMHGNEALGRELMLQLSEFLCEEFRNRNQRIVQLIQDTRIHILPSMNPDGYEVAAAQGPNKPGYLVGRNNANGVDLNRNFPDLNTYIYYNEKYGGPNHHLPLPDNWKSQVEPETRAVIRWMHSFNFVLSANLHGGAVVANYPYDKSFEHRVRGVRRTASTPTPDDKLFQKLAKVYSYAHGWMFQGWNCGDYFPDGITNGASWYSLSKGMQDFNYLHTNCFEITLELSCDKFPPEEELQREWLGNREALIQFLEQVHQGIKGMVLDENYNNLANAVISVSGINHDVTSGDHGDYFRLLLPGIYTVSATAPGYDPETVTVTVGPAEPTLVNFHLKRSGSSGGSSGGSSGDAHKSEVAHRFKDLGEENFKALVLIAFAQYLQQCPFEDHVKLVNEVTEFAKTCVADESAENCDKSLHTLFGDKLCTVATLRETYGEMADCCAKQEPERNECFLQHKDDNPNLPRLVRPEVDVMCTAFHDNEETFLKKYLYEIARRHPYFYAPELLFFAKRYKAAFTECCQAADKAACLLPKLDELRDEGKASSAKQRLKCASLQKFGERAFKAWAVARLSQRFPKAEFAEVSKLVTDLTKVHTECCHGDLLECADDRADLAKYICENQDSISSKLKECCEKPLLEKSHCIAEVENDEMPADLPSLAADFVESKDVCKNYAEAKDVFLGMFLYEYARRHPDYSVVLLLRLAKTYETTLEKCCAAADPHECYAKVFDEFKPLVEEPQNLIKQNCELFEQLGEYKFQNALLVRYTKKVPQVSTPTLVEVSRNLGKVGSKCCKHPEAKRMPCAEDYLSVVLNQLCVLHEKTPVSDRVTKCCTESLVNRRPCFSALEVDETYVPKEFNAETFTFHADICTLSEKERQIKKQTALVELVKHKPKATKEQLKAVMDDFAAFVEKCCKADDKETCFAEEGKKLVAASQAALGL

SEQ ID NO: 250 - protein, 782 aa, Artificial Sequence
  hCPN1 variant
KTEEGKLVIWINGDKGYNGLAEVGKKFEKDTGIKVTVEHPDKLEEKFPQVAATGDGPDIIFWAHDRFGGYAQSGLLAEITPAAAFQDKLYPFTWDAVRYNGKLIAYPIAVEALSLIYNKDLLPNPPKTWEEIPALDKELKAKGKSALMFNLQEPYFTWPLIAADGGYAFKYAAGKYDIKDVGVDNAGAKAGLTFLVDLIKNKHMNADTDYSIAEHAFNHGETAMTINGPWAWSNIDTSAVNYGVTVLPTFKGQPSKPFVGVLSAGINAASPNKELAKEFLENYLLTDEGLEAVNKDKPLGAVALKSYEEELVKDPRVAATMENAQKGEIMPNIPQMSAFWYAVRTAVINAASGRQTVDAALAAAQTNAAAASSASLEENLYFQGVTFRHHRYDDLVRTLYKVQNECPGITRVYSIGRSVEGRHLYVLEFSDHPGIHEPLEPEVKYVGNMHGNEALGRELMLQLSEFLCEEFRNRNQRIVQLIQDTRIHILPSMNPDGYEVAAAQGPNKPGYLVGRNNANGVDLNRNFPDLNTYIYYNEKYGGPNHHLPLPDNWKSQVEPETRAVIRWMHSFNFVLSANLHGGAVVANYPYDKSFEHRVRGVRRTASTPTPDDKLFQKLAKVYSYAHGWMFQGWNCGDYFPDGITNGASWFSLSKGMQDFNYLHTNCFEITLQLSCDKFPPEEELQREWLGNREALIQFLEQVHQGIKGMVLDENYNNLANAVISVSGINHDVTSGDHGDYFRLLLPGIYTVSATAPGYDPETVTVTVGPAEPTLVNFHLKRS

SEQ ID NO: 251 - protein, 1386 aa, Artificial Sequence
  hCPN1 variant
KTEEGKLVIWINGDKGYNGLAEVGKKFEKDTGIKVTVEHPDKLEEKFPQVAATGDGPDIIFWAHDRFGGYAQSGLLAEITPAAAFQDKLYPFTWDAVRYNGKLIAYPIAVEALSLIYNKDLLPNPPKTWEEIPALDKELKAKGKSALMFNLQEPYFTWPLIAADGGYAFKYAAGKYDIKDVGVDNAGAKAGLTFLVDLIKNKHMNADTDYSIAEHAFNHGETAMTINGPWAWSNIDTSAVNYGVTVLPTFKGQPSKPFVGVLSAGINAASPNKELAKEFLENYLLTDEGLEAVNKDKPLGAVALKSYEEELVKDPRVAATMENAQKGEIMPNIPQMSAFWYAVRTAVINAASGRQTVDAALAAAQTNAAAASSASLEENLYFQGVTFRHHRYDDLVRTLYKVQNECPGITRVYSIGRSVEGRHLYVLEFSDHPGIHEPLEPEVKYVGNMHGNEALGRELMLQLSEFLCEEFRNRNQRIVQLIQDTRIHILPSMNPDGYEVAAAQGPNKPGYLVGRNNANGVDLNRNFPDLNTYIYYNEKYGGPNHHLPLPDNWKSQVEPETRAVIRWMHSFNFVLSANLHGGAVVANYPYDKSFEHRVRGVRRTASTPTPDDKLFQKLAKVYSYAHGWMFQGWNCGDYFPDGITNGASWFSLSKGMQDFNYLHTNCFEITLQLSCDKFPPEEELQREWLGNREALIQFLEQVHQGIKGMVLDENYNNLANAVISVSGINHDVTSGDHGDYFRLLLPGIYTVSATAPGYDPETVTVTVGPAEPTLVNFHLKRSENLYFQGGSSGGSSGGSSGDAHKSEVAHRFKDLGEENFKALVLIAFAQYLQQCPFEDHVKLVNEVTEFAKTCVADESAENCDKSLHTLFGDKLCTVATLRETYGEMADCCAKQEPERNECFLQHKDDNPNLPRLVRPEVDVMCTAFHDNEETFLKKYLYEIARRHPYFYAPELLFFAKRYKAAFTECCQAADKAACLLPKLDELRDEGKASSAKQRLKCASLQKFGERAFKAWAVARLSQRFPKAEFAEVSKLVTDLTKVHTECCHGDLLECADDRADLAKYICENQDSISSKLKECCEKPLLEKSHCIAEVENDEMPADLPSLAADFVESKDVCKNYAEAKDVFLGMFLYEYARRHPDYSVVLLLRLAKTYETTLEKCCAAADPHECYAKVFDEFKPLVEEPQNLIKQNCELFEQLGEYKFQNALLVRYTKKVPQVSTPTLVEVSRNLGKVGSKCCKHPEAKRMPCAEDYLSVVLNQLCVLHEKTPVSDRVTKCCTESLVNRRPCFSALEVDETYVPKEFNAETFTFHADICTLSEKERQIKKQTALVELVKHKPKATKEQLKAVMDDFAAFVEKCCKADDKETCFAEEGKKLVAASQAALGL

SEQ ID NO: 252 - protein, 822 aa, Artificial Sequence
  hCPN1 variant
KTEEGKLVIWINGDKGYNGLAEVGKKFEKDTGIKVTVEHPDKLEEKFPQVAATGDGPDIIFWAHDRFGGYAQSGLLAEITPAAAFQDKLYPFTWDAVRYNGKLIAYPIAVEALSLIYNKDLLPNPPKTWEEIPALDKELKAKGKSALMFNLQEPYFTWPLIAADGGYAFKYAAGKYDIKDVGVDNAGAKAGLTFLVDLIKNKHMNADTDYSIAEHAFNHGETAMTINGPWAWSNIDTSAVNYGVTVLPTFKGQPSKPFVGVLSAGINAASPNKELAKEFLENYLLTDEGLEAVNKDKPLGAVALKSYEEELVKDPRVAATMENAQKGEIMPNIPQMSAFWYAVRTAVINAASGRQTVDAALAAAQTNAAAASSASLEENLYFQGVTFRHHRYDDLVRTLYKVQNECPGITRVYSIGRSVEGRHLYVLEFSDHPGIHEPLEPEVKYVGNMHGNEALGRELMLQLSEFLCEEFRNRNQRIVQLIQDTRIHILPSMNPDGYEVAAAQGPNKPGYLVGRNNANGVDLNRNFPDLNTYIYYNEKYGGPNHHLPLPDNWKSQVEPETRAVIRWMHSFNFVLSANLHGGAVVANYPYDKSFEHRVRGVRRTASTPTPDDKLFQKLAKVYSYAHGWMFQGWNCGDYFPDGITNGASWYSLSKGMQDFNYLHTNCFEITLELSCDKFPPEEELQREWLGNREALIQFLEQVHQGIKGMVLDENYNNLANAVISVSGINHDVTSGDHGDYFRLLLPGIYTVSATAPGYDPETVTVTVGPAEPTLVNFHLKRSIPQVSPVRRAPSRRHGVRAKVQPQARKKEMEMRQLQRGPA

SEQ ID NO: 253 - protein, 1426 aa, Artificial Sequence
  hCPN1 variant
KTEEGKLVIWINGDKGYNGLAEVGKKFEKDTGIKVTVEHPDKLEEKFPQVAATGDGPDIIFWAHDRFGGYAQSGLLAEITPAAAFQDKLYPFTWDAVRYNGKLIAYPIAVEALSLIYNKDLLPNPPKTWEEIPALDKELKAKGKSALMFNLQEPYFTWPLIAADGGYAFKYAAGKYDIKDVGVDNAGAKAGLTFLVDLIKNKHMNADTDYSIAEHAFNHGETAMTINGPWAWSNIDTSAVNYGVTVLPTFKGQPSKPFVGVLSAGINAASPNKELAKEFLENYLLTDEGLEAVNKDKPLGAVALKSYEEELVKDPRVAATMENAQKGEIMPNIPQMSAFWYAVRTAVINAASGRQTVDAALAAAQTNAAAASSASLEENLYFQGVTFRHHRYDDLVRTLYKVQNECPGITRVYSIGRSVEGRHLYVLEFSDHPGIHEPLEPEVKYVGNMHGNEALGRELMLQLSEFLCEEFRNRNQRIVQLIQDTRIHILPSMNPDGYEVAAAQGPNKPGYLVGRNNANGVDLNRNFPDLNTYIYYNEKYGGPNHHLPLPDNWKSQVEPETRAVIRWMHSFNFVLSANLHGGAVVANYPYDKSFEHRVRGVRRTASTPTPDDKLFQKLAKVYSYAHGWMFQGWNCGDYFPDGITNGASWYSLSKGMQDFNYLHTNCFEITLELSCDKFPPEEELQREWLGNREALIQFLEQVHQGIKGMVLDENYNNLANAVISVSGINHDVTSGDHGDYFRLLLPGIYTVSATAPGYDPETVTVTVGPAEPTLVNFHLKRSIPQVSPVRRAPSRRHGVRAKVQPQARKKEMEMRQLQRGPAENLYFQGGSSGGSSGGSSGDAHKSEVAHRFKDLGEENFKALVLIAFAQYLQQCPFEDHVKLVNEVTEFAKTCVADESAENCDKSLHTLFGDKLCTVATLRETYGEMADCCAKQEPERNECFLQHKDDNPNLPRLVRPEVDVMCTAFHDNEETFLKKYLYEIARRHPYFYAPELLFFAKRYKAAFTECCQAADKAACLLPKLDELRDEGKASSAKQRLKCASLQKFGERAFKAWAVARLSQRFPKAEFAEVSKLVTDLTKVHTECCHGDLLECADDRADLAKYICENQDSISSKLKECCEKPLLEKSHCIAEVENDEMPADLPSLAADFVESKDVCKNYAEAKDVFLGMFLYEYARRHPDYSVVLLLRLAKTYETTLEKCCAAADPHECYAKVFDEFKPLVEEPQNLIKQNCELFEQLGEYKFQNALLVRYTKKVPQVSTPTLVEVSRNLGKVGSKCCKHPEAKRMPCAEDYLSVVLNQLCVLHEKTPVSDRVTKCCTESLVNRRPCFSALEVDETYVPKEFNAETFTFHADICTLSEKERQIKKQTALVELVKHKPKATKEQLKAVMDDFAAFVEKCCKADDKETCFAEEGKKLVAASQAALGL

SEQ ID NO: 254 - protein, 822 aa, Artificial Sequence
  hCPN1 variant
KTEEGKLVIWINGDKGYNGLAEVGKKFEKDTGIKVTVEHPDKLEEKFPQVAATGDGPDIIFWAHDRFGGYAQSGLLAEITPAAAFQDKLYPFTWDAVRYNGKLIAYPIAVEALSLIYNKDLLPNPPKTWEEIPALDKELKAKGKSALMFNLQEPYFTWPLIAADGGYAFKYAAGKYDIKDVGVDNAGAKAGLTFLVDLIKNKHMNADTDYSIAEHAFNHGETAMTINGPWAWSNIDTSAVNYGVTVLPTFKGQPSKPFVGVLSAGINAASPNKELAKEFLENYLLTDEGLEAVNKDKPLGAVALKSYEEELVKDPRVAATMENAQKGEIMPNIPQMSAFWYAVRTAVINAASGRQTVDAALAAAQTNAAAASSASLEENLYFQGVTFRHHRYDDLVRTLYKVQNECPGITRVYSIGRSVEGRHLYVLEFSDHPGIHEPLEPEVKYVGNMHGNEALGRELMLQLSEFLCEEFRNRNQRIVQLIQDTRIHILPSMNPDGYEVAAAQGPNKPGYLVGRNNANGVDLNRNFPDLNTYIYYNEKYGGPNHHLPLPDNWKSQVEPETRAVIRWMHSFNFVLSANLHGGAVVANYPYDKSFEHRVRGVRRTASTPTPDDKLFQKLAKVYSYAHGWMFQGWNCGDYFPDGITNGASWFSLSKGMQDFNYLHTNCFEITLQLSCDKFPPEEELQREWLGNREALIQFLEQVHQGIKGMVLDENYNNLANAVISVSGINHDVTSGDHGDYFRLLLPGIYTVSATAPGYDPETVTVTVGPAEPTLVNFHLKRSIPQVSPVRRAPSRRHGVRAKVQPQARKKEMEMRQLQRGPA

SEQ ID NO: 255 - protein, 1426 aa, Artificial Sequence
  hCPN1 variant
KTEEGKLVIWINGDKGYNGLAEVGKKFEKDTGIKVTVEHPDKLEEKFPQVAATGDGPDIIFWAHDRFGGYAQSGLLAEITPAAAFQDKLYPFTWDAVRYNGKLIAYPIAVEALSLIYNKDLLPNPPKTWEEIPALDKELKAKGKSALMFNLQEPYFTWPLIAADGGYAFKYAAGKYDIKDVGVDNAGAKAGLTFLVDLIKNKHMNADTDYSIAEHAFNHGETAMTINGPWAWSNIDTSAVNYGVTVLPTFKGQPSKPFVGVLSAGINAASPNKELAKEFLENYLLTDEGLEAVNKDKPLGAVALKSYEEELVKDPRVAATMENAQKGEIMPNIPQMSAFWYAVRTAVINAASGRQTVDAALAAAQTNAAAASSASLEENLYFQGVTFRHHRYDDLVRTLYKVQNECPGITRVYSIGRSVEGRHLYVLEFSDHPGIHEPLEPEVKYVGNMHGNEALGRELMLQLSEFLCEEFRNRNQRIVQLIQDTRIHILPSMNPDGYEVAAAQGPNKPGYLVGRNNANGVDLNRNFPDLNTYIYYNEKYGGPNHHLPLPDNWKSQVEPETRAVIRWMHSFNFVLSANLHGGAVVANYPYDKSFEHRVRGVRRTASTPTPDDKLFQKLAKVYSYAHGWMFQGWNCGDYFPDGITNGASWFSLSKGMQDFNYLHTNCFEITLQLSCDKFPPEEELQREWLGNREALIQFLEQVHQGIKGMVLDENYNNLANAVISVSGINHDVTSGDHGDYFRLLLPGIYTVSATAPGYDPETVTVTVGPAEPTLVNFHLKRSIPQVSPVRRAPSRRHGVRAKVQPQARKKEMEMRQLQRGPAENLYFQGGSSGGSSGGSSGDAHKSEVAHRFKDLGEENFKALVLIAFAQYLQQCPFEDHVKLVNEVTEFAKTCVADESAENCDKSLHTLFGDKLCTVATLRETYGEMADCCAKQEPERNECFLQHKDDNPNLPRLVRPEVDVMCTAFHDNEETFLKKYLYEIARRHPYFYAPELLFFAKRYKAAFTECCQAADKAACLLPKLDELRDEGKASSAKQRLKCASLQKFGERAFKAWAVARLSQRFPKAEFAEVSKLVTDLTKVHTECCHGDLLECADDRADLAKYICENQDSISSKLKECCEKPLLEKSHCIAEVENDEMPADLPSLAADFVESKDVCKNYAEAKDVFLGMFLYEYARRHPDYSVVLLLRLAKTYETTLEKCCAAADPHECYAKVFDEFKPLVEEPQNLIKQNCELFEQLGEYKFQNALLVRYTKKVPQVSTPTLVEVSRNLGKVGSKCCKHPEAKRMPCAEDYLSVVLNQLCVLHEKTPVSDRVTKCCTESLVNRRPCFSALEVDETYVPKEFNAETFTFHADICTLSEKERQIKKQTALVELVKHKPKATKEQLKAVMDDFAAFVEKCCKADDKETCFAEEGKKLVAASQAALGL

SEQ ID NO: 256 - protein, 1243 aa, Artificial Sequence
  hCPN1 variant
MSPILGYWKIKGLVQPTRLLLEYLEEKYEEHLYERDEGDKWRNKKFELGLEFPNLPYYIDGDVKLTQSMAIIRYIADKHNMLGGCPKERAEISMLEGAVLDIRYGVSRIAYSKDFETLKVDFLSKLPEMLKMFEDRLCHKTYLNGDHVTHPDFMLYDALDVVLYMDPMCLDAFPKLVCFKKRIEAIPQIDKYLKSSKYIAWPLQGWQATFGGGDHPPKAAAQTNAAAASSASLEENLYFQGVTFRHHRYDDLVRTLYKVQNECPGITRVYSIGRSVEGRHLYVLEFSDHPGIHEPLEPEVKYVGNMHGNEALGRELMLQLSEFLCEEFRNRNQRIVQLIQDTRIHILPSMNPDGYEVAAAQGPNKPGYLVGRNNANGVDLNRNFPDLNTYIYYNEKYGGPNHHLPLPDNWKSQVEPETRAVIRWMHSFNFVLSANLHGGAVVANYPYDKSFEHRVRGVRRTASTPTPDDKLFQKLAKVYSYAHGWMFQGWNCGDYFPDGITNGASWFSLSKGMQDFNYLHTNCFEITLQLSCDKFPPEEELQREWLGNREALIQFLEQVHQGIKGMVLDENYNNLANAVISVSGINHDVTSGDHGDYFRLLLPGIYTVSATAPGYDPETVTVTVGPAEPTLVNFHLKRSENLYFQGGSSGGSSGGSSGDAHKSEVAHRFKDLGEENFKALVLIAFAQYLQQCPFEDHVKLVNEVTEFAKTCVADESAENCDKSLHTLFGDKLCTVATLRETYGEMADCCAKQEPERNECFLQHKDDNPNLPRLVRPEVDVMCTAFHDNEETFLKKYLYEIARRHPYFYAPELLFFAKRYKAAFTECCQAADKAACLLPKLDELRDEGKASSAKQRLKCASLQKFGERAFKAWAVARLSQRFPKAEFAEVSKLVTDLTKVHTECCHGDLLECADDRADLAKYICENQDSISSKLKECCEKPLLEKSHCIAEVENDEMPADLPSLAADFVESKDVCKNYAEAKDVFLGMFLYEYARRHPDYSVVLLLRLAKTYETTLEKCCAAADPHECYAKVFDEFKPLVEEPQNLIKQNCELFEQLGEYKFQNALLVRYTKKVPQVSTPTLVEVSRNLGKVGSKCCKHPEAKRMPCAEDYLSVVLNQLCVLHEKTPVSDRVTKCCTESLVNRRPCFSALEVDETYVPKEFNAETFTFHADICTLSEKERQIKKQTALVELVKHKPKATKEQLKAVMDDFAAFVEKCCKADDKETCFAEEGKKLVAASQAALGL

SEQ ID NO: 257 - protein, 639 aa, Artificial Sequence
  hCPN1 variant
MSPILGYWKIKGLVQPTRLLLEYLEEKYEEHLYERDEGDKWRNKKFELGLEFPNLPYYIDGDVKLTQSMAIIRYIADKHNMLGGCPKERAEISMLEGAVLDIRYGVSRIAYSKDFETLKVDFLSKLPEMLKMFEDRLCHKTYLNGDHVTHPDFMLYDALDVVLYMDPMCLDAFPKLVCFKKRIEAIPQIDKYLKSSKYIAWPLQGWQATFGGGDHPPKAAAQTNAAAASSASLEENLYFQGVTFRHHRYDDLVRTLYKVQNECPGITRVYSIGRSVEGRHLYVLEFSDHPGIHEPLEPEVKYVGNMHGNEALGRELMLQLSEFLCEEFRNRNQRIVQLIQDTRIHILPSMNPDGYEVAAAQGPNKPGYLVGRNNANGVDLNRNFPDLNTYIYYNEKYGGPNHHLPLPDNWKSQVEPETRAVIRWMHSFNFVLSANLHGGAVVANYPYDKSFEHRVRGVRRTASTPTPDDKLFQKLAKVYSYAHGWMFQGWNCGDYFPDGITNGASWYSLSKGMQDFNYLHTNCFEITLELSCDKFPPEEELQREWLGNREALIQFLEQVHQGIKGMVLDENYNNLANAVISVSGINHDVTSGDHGDYFRLLLPGIYTVSATAPGYDPETVTVTVGPAEPTLVNFHLKRS

SEQ ID NO: 258 - protein, 639 aa, Artificial Sequence; identical to SEQ ID NO: 257
  hCPN1 variant

SEQ ID NO: 259 - protein, 1046 aa, Artificial Sequence
  hCPN1 variant
VTFRHHRYDDLVRTLYKVQNECPGITRVYSIGRSVEGRHLYVLEFSDHPGIHEPLEPEVKYVGNMHGNEALGRELMLQLSEFLCEEFRNRNQRIVQLIQDTRIHILPSMNPDGYEVAAAQGPNKPGYLVGRNNANGVDLNRNFPDLNTYIYYNEKYGGPNHHLPLPDNWKSQVEPETRAVIRWMHSFNFVLSANLHGGAVVANYPYDKSFEHRVRGVRRTASTPTPDDKLFQKLAKVYSYAHGWMFQGWNCGDYFPDGITNGASWFSLSKGMQDFNYLHTNCFEITLQLSCDKFPPEEELQREWLGNREALIQFLEQVHQGIKGMVLDENYNNLANAVISVSGINHDVTSGDHGDYFRLLLPGIYTVSATAPGYDPETVTVTVGPAEPTLVNFHLKRSDDDDKIPQVSPVRAPSRRHGVRAKVQPQARKKEMEMRQLQRGPAENLYFQGGSSGGSSGGSSGDAHKSEVAHRFKDLGEENFKALVLIAFAQYLQQCPFEDHVKLVNEVTEFAKTCVADESAENCDKSLHTLFGDKLCTVATLRETYGEMADCCAKQEPERNECFLQHKDDNPNLPRLVRPEVDVMCTAFHDNEETFLKKYLYEIARRHPYFYAPELLFFAKRYKAAFTECCQAADKAACLLPKLDELRDEGKASSAKQRLKCASLQKFGERAFKAWAVARLSQRFPKAEFAEVSKLVTDLTKVHTECCHGDLLECADDRADLAKYICENQDSISSKLKECCEKPLLEKSHCIAEVENDEMPADLPSLAADFVESKDVCKNYAEAKDVFLGMFLYEYARRHPDYSVVLLLRLAKTYETTLEKCCAAADPHECYAKVFDEFKPLVEEPQNLIKQNCELFEQLGEYKFQNALLVRYTKKVPQVSTPTLVEVSRNLGKVGSKCCKHPEAKRMPCAEDYLSVVLNQLCVLHEKTPVSDRVTKCCTESLVNRRPCFSALEVDETYVPKEFNAETFTFHADICTLSEKERQIKKQTALVELVKHKPKATKEQLKAVMDDFAAFVEKCCKADDKETCFAEEGKKLVAASQAALGL

SEQ ID NO: 260 - protein, 1041 aa, Artificial Sequence
  hCPN1 variant
VTFRHHRYDDLVRTLYKVQNECPGITRVYSIGRSVEGRHLYVLEFSDHPGIHEPLEPEVKYVGNMHGNEALGRELMLQLSEFLCEEFRNRNQRIVQLIQDTRIHILPSMNPDGYEVAAAQGPNKPGYLVGRNNANGVDLNRNFPDLNTYIYYNEKYGGPNHHLPLPDNWKSQVEPETRAVIRWMHSFNFVLSANLHGGAVVANYPYDKSFEHRVRGVRRTASTPTPDDKLFQKLAKVYSYAHGWMFQGWNCGDYFPDGITNGASWFSLSKGMQDFNYLHTNCFEITLQLSCDKFPPEEELQREWLGNREALIQFLEQVHQGIKGMVLDENYNNLANAVISVSGINHDVTSGDHGDYFRLLLPGIYTVSATAPGYDPETVTVTVGPAEPTLVNFHLKRSIPQVSPVRAPSRRHGVRAKVQPQARKKEMEMRQLQRGPAENLYFQGGSSGGSSGGSSGDAHKSEVAHRFKDLGEENFKALVLIAFAQYLQQCPFEDHVKLVNEVTEFAKTCVADESAENCDKSLHTLFGDKLCTVATLRETYGEMADCCAKQEPERNECFLQHKDDNPNLPRLVRPEVDVMCTAFHDNEETFLKKYLYEIARRHPYFYAPELLFFAKRYKAAFTECCQAADKAACLLPKLDELRDEGKASSAKQRLKCASLQKFGERAFKAWAVARLSQRFPKAEFAEVSKLVTDLTKVHTECCHGDLLECADDRADLAKYICENQDSISSKLKECCEKPLLEKSHCIAEVENDEMPADLPSLAADFVESKDVCKNYAEAKDVFLGMFLYEYARRHPDYSVVLLLRLAKTYETTLEKCCAAADPHECYAKVFDEFKPLVEEPQNLIKQNCELFEQLGEYKFQNALLVRYTKKVPQVSTPTLVEVSRNLGKVGSKCCKHPEAKRMPCAEDYLSVVLNQLCVLHEKTPVSDRVTKCCTESLVNRRPCFSALEVDETYVPKEFNAETFTFHADICTLSEKERQIKKQTALVELVKHKPKATKEQLKAVMDDFAAFVEKCCKADDKETCFAEEGKKLVAASQAALGL

SEQ ID NO: 261 - protein, 1034 aa, Artificial Sequence
  hCPN1 variant
VTFRHHRYDDLVRTLYKVQNECPGITRVYSIGRSVEGRHLYVLEFSDHPGIHEPLEPEVKYVGNMHGNEALGRELMLQLSEFLCEEFRNRNQRIVQLIQDTRIHILPSMNPDGYEVAAAQGPNKPGYLVGRNNANGVDLNRNFPDLNTYIYYNEKYGGPNHHLPLPDNWKSQVEPETRAVIRWMHSFNFVLSANLHGGAVVANYPYDKSFEHRVRGVRRTASTPTPDDKLFQKLAKVYSYAHGWMFQGWNCGDYFPDGITNGASWFSLSKGMQDFNYLHTNCFEITLQLSCDKFPPEEELQREWLGNREALIQFLEQVHQGIKGMVLDENYNNLANAVISVSGINHDVTSGDHGDYFRLLLPGIYTVSATAPGYDPETVTVTVGPAEPTLVNFHLKRSIPQVSPVRAPSRRHGVRAKVQPQARKKEMEMRQLQRGPAGSSGGSSGGSSGDAHKSEVAHRFKDLGEENFKALVLIAFAQYLQQCPFEDHVKLVNEVTEFAKTCVADESAENCDKSLHTLFGDKLCTVATLRETYGEMADCCAKQEPERNECFLQHKDDNPNLPRLVRPEVDVMCTAFHDNEETFLKKYLYEIARRHPYFYAPELLFFAKRYKAAFTECCQAADKAACLLPKLDELRDEGKASSAKQRLKCASLQKFGERAFKAWAVARLSQRFPKAEFAEVSKLVTDLTKVHTECCHGDLLECADDRADLAKYICENQDSISSKLKECCEKPLLEKSHCIAEVENDEMPADLPSLAADFVESKDVCKNYAEAKDVFLGMFLYEYARRHPDYSVVLLLRLAKTYETTLEKCCAAADPHECYAKVFDEFKPLVEEPQNLIKQNCELFEQLGEYKFQNALLVRYTKKVPQVSTPTLVEVSRNLGKVGSKCCKHPEAKRMPCAEDYLSVVLNQLCVLHEKTPVSDRVTKCCTESLVNRRPCFSALEVDETYVPKEFNAETFTFHADICTLSEKERQIKKQTALVELVKHKPKATKEQLKAVMDDFAAFVEKCCKADDKETCFAEEGKKLVAASQAALGL

SEQ ID NO: 262 - protein, 917 aa, Artificial Sequence
  hCPN1 variant
VTFRHHRYDDLVRTLYKVQNECPGITRVYSIGRSVEGRHLYVLEFSDHPGIHEPNEPEVKYVGNMHGNEALGRELMLQLSEFLCEEFRNRNQRIVQLIQDTRIHILPSMNPDGYEVAAAQGPNKPGYLVGRNNANGVDLNRNFPDLNTYIYYNEKYGGPNRHLPLPDNWKSQVEPETRAVIRWMHSFDFKLSANLHGGAVVANYPYDKSFEHRVRGVRRTASTPTPDDEWFQKLAKVYSYAHGWMFQGWNCGDYFPDGITNGASWYSLSKGMQDFNYLHTDSYEITLELSCDKFPPEEELQREWLGNKEALIQFLEQVHNGSSGGSSGGSSGDAHKSEVAHRFKDLGEENFKALVLIAFAQYLQQCPFEDHVKLVNEVTEFAKTCVADESAENCDKSLHTLFGDKLCTVATLRETYGEMADCCAKQEPERNECFLQHKDDNPNLPRLVRPEVDVMCTAFHDNEETFLKKYLYEIARRHPYFYAPELLFFAKRYKAAFTECCQAADKAACLLPKLDELRDEGKASSAKQRLKCASLQKFGERAFKAWAVARLSQRFPKAEFAEVSKLVTDLTKVHTECCHGDLLECADDRADLAKYICENQDSISSKLKECCEKPLLEKSHCIAEVENDEMPADLPSLAADFVESKDVCKNYAEAKDVFLGMFLYEYARRHPDYSVVLLLRLAKTYETTLEKCCAAADPHECYAKVFDEFKPLVEEPQNLIKQNCELFEQLGEYKFQNALLVRYTKKVPQVSTPTLVEVSRNLGKVGSKCCKHPEAKRMPCAEDYLSVVLNQLCVLHEKTPVSDRVTKCCTESLVNRRPCFSALEVDETYVPKEFNAETFTFHADICTLSEKERQIKKQTALVELVKHKPKATKEQLKAVMDDFAAFVEKCCKADDKETCFAEEGKKLVAASQAALGL

SEQ ID NO: 263 - protein, 917 aa, Artificial Sequence
  hCPN1 variant
VTFRHHRYDDLVRTLYKVQNECPGITRVYSIGRSVEGRHLYVLEFSDHPGIHEPNEPEVKYVGNMHGNEALGRELMLQLSEFLCEEFRNRNQRIVQLIQDTRIHILPSMNPDGYEVAAAQGPNKPGYLVGRNNANGVDLNRNFPDLNTYIYYNEKYGGPNSHLPLPDNWKSQVEPETRAVIRWMHSFDFRLSANLHGGAVVANYPYDKSFEHRVRGVRRTASTPTPDDEWFQKLAKVYSYAHGWMFQGWNCGDYFPDGITNGASWYSLSKGMQDFNYLHTNSYEITLELSCDKFPPEEELQREWLGNKEALIQFLEQVHNGSSGGSSGGSSGDAHKSEVAHRFKDLGEENFKALVLIAFAQYLQQCPFEDHVKLVNEVTEFAKTCVADESAENCDKSLHTLFGDKLCTVATLRETYGEMADCCAKQEPERNECFLQHKDDNPNLPRLVRPEVDVMCTAFHDNEETFLKKYLYEIARRHPYFYAPELLFFAKRYKAAFTECCQAADKAACLLPKLDELRDEGKASSAKQRLKCASLQKFGERAFKAWAVARLSQRFPKAEFAEVSKLVTDLTKVHTECCHGDLLECADDRADLAKYICENQDSISSKLKECCEKPLLEKSHCIAEVENDEMPADLPSLAADFVESKDVCKNYAEAKDVFLGMFLYEYARRHPDYSVVLLLRLAKTYETTLEKCCAAADPHECYAKVFDEFKPLVEEPQNLIKQNCELFEQLGEYKFQNALLVRYTKKVPQVSTPTLVEVSRNLGKVGSKCCKHPEAKRMPCAEDYLSVVLNQLCVLHEKTPVSDRVTKCCTESLVNRRPCFSALEVDETYVPKEFNAETFTFHADICTLSEKERQIKKQTALVELVKHKPKATKEQLKAVMDDFAAFVEKCCKADDKETCFAEEGKKLVAASQAALGL

SEQ ID NO: 264 - protein, 917 aa, Artificial Sequence
  hCPN1 variant
VTFRHHRYDDLVRTLYKVQNECPGITRVYSIGRSVEGRHLYVLEFSDHPGIHEPNEPEVKYVGNMHGNEALGRELMLQLSEFLCEEFRNRNQRIVQLIQDTRIHILPSMNPDGYEVAAAQGPNKPGYLVGRNNANGVDLNRNFPDLNTYIYYNEKYGGPNKHLPLPDNWKSQVEPETRAVIRWMHSFDFKLSANLHGGAVVANYPYDKSFEHRVRGVRRTASTPTPDDEWFQKLAKVYSYAHGWMFQGWNCGDYFPDGITNGASWYSLSKGMQDFNYLHTNSYEITLELSCDKFPPEEELQREWLGNKEALIQFLEQVHNGSSGGSSGGSSGDAHKSEVAHRFKDLGEENFKALVLIAFAQYLQQCPFEDHVKLVNEVTEFAKTCVADESAENCDKSLHTLFGDKLCTVATLRETYGEMADCCAKQEPERNECFLQHKDDNPNLPRLVRPEVDVMCTAFHDNEETFLKKYLYEIARRHPYFYAPELLFFAKRYKAAFTECCQAADKAACLLPKLDELRDEGKASSAKQRLKCASLQKFGERAFKAWAVARLSQRFPKAEFAEVSKLVTDLTKVHTECCHGDLLECADDRADLAKYICENQDSISSKLKECCEKPLLEKSHCIAEVENDEMPADLPSLAADFVESKDVCKNYAEAKDVFLGMFLYEYARRHPDYSVVLLLRLAKTYETTLEKCCAAADPHECYAKVFDEFKPLVEEPQNLIKQNCELFEQLGEYKFQNALLVRYTKKVPQVSTPTLVEVSRNLGKVGSKCCKHPEAKRMPCAEDYLSVVLNQLCVLHEKTPVSDRVTKCCTESLVNRRPCFSALEVDETYVPKEFNAETFTFHADICTLSEKERQIKKQTALVELVKHKPKATKEQLKAVMDDFAAFVEKCCKADDKETCFAEEGKKLVAASQAALGL

SEQ ID NO: 265 - protein, 917 aa, Artificial Sequence
  hCPN1 variant
VTFRHHRYDDLVRTLYKVQNECPGITRVYSIGRSVEGRHLYVLEFSDHPGIHEPNEPEVKYVGNMHGNEALGRELMLQLSEFLCEEFRNRNQRIVQLIQDTRIHILPSMNPDGYEVAAAQGPNKPGYLVGRNNANGVDLNRNFPDLNTYIYYNEKYGGPNSHLPLPDNWKSQVEPETRAVIRWMHSFDFRLSANLHGGAVVANYPYDKSFEHRVRGVRRTASTPTPDDEKFQDLAKVYSYAHGWMFQGWNCGDYFPDGITNGASWYSLSKGMQDFNYLHTNSYEITLELSCDKFPPEEELQREWLGNKEALIQFLEQVHKGSSGGSSGGSSGDAHKSEVAHRFKDLGEENFKALVLIAFAQYLQQCPFEDHVKLVNEVTEFAKTCVADESAENCDKSLHTLFGDKLCTVATLRETYGEMADCCAKQEPERNECFLQHKDDNPNLPRLVRPEVDVMCTAFHDNEETFLKKYLYEIARRHPYFYAPELLFFAKRYKAAFTECCQAADKAACLLPKLDELRDEGKASSAKQRLKCASLQKFGERAFKAWAVARLSQRFPKAEFAEVSKLVTDLTKVHTECCHGDLLECADDRADLAKYICENQDSISSKLKECCEKPLLEKSHCIAEVENDEMPADLPSLAADFVESKDVCKNYAEAKDVFLGMFLYEYARRHPDYSVVLLLRLAKTYETTLEKCCAAADPHECYAKVFDEFKPLVEEPQNLIKQNCELFEQLGEYKFQNALLVRYTKKVPQVSTPTLVEVSRNLGKVGSKCCKHPEAKRMPCAEDYLSVVLNQLCVLHEKTPVSDRVTKCCTESLVNRRPCFSALEVDETYVPKEFNAETFTFHADICTLSEKERQIKKQTALVELVKHKPKATKEQLKAVMDDFAAFVEKCCKADDKETCFAEEGKKLVAASQAALGL

SEQ ID NO: 266 - protein, 917 aa, Artificial Sequence
  hCPN1 variant
VTFRHHRYDDLVRTLYKVQNECPGITRVYSIGRSVEGRHLYVLEFSDHPGIHEPNEPEVKYVGNMHGNEALGRELMLQLSEFLCEEFRNRNQRIVQLIQDTRIHILPSMNPDGYEVAAAQGPNKPGYLVGRNNANGVDLNRNFPDLNTYIYYNEKYGGPNRHLPLPDNWKSQVEPETRAVIRWMHSFDFKLSANLHGGAVVANYPYDKSFEHRVRGVRRTASTPTPDDEWFQHLAKVYSYAHGWMFQGWNCGDYFPDGITNGASWYSLSKGMQDFNYLHTDSYEITLELSCDKFPPEEELQREWLGNKEALIQFLEQVHNGSSGGSSGGSSGDAHKSEVAHRFKDLGEENFKALVLIAFAQYLQQCPFEDHVKLVNEVTEFAKTCVADESAENCDKSLHTLFGDKLCTVATLRETYGEMADCCAKQEPERNECFLQHKDDNPNLPRLVRPEVDVMCTAFHDNEETFLKKYLYEIARRHPYFYAPELLFFAKRYKAAFTECCQAADKAACLLPKLDELRDEGKASSAKQRLKCASLQKFGERAFKAWAVARLSQRFPKAEFAEVSKLVTDLTKVHTECCHGDLLECADDRADLAKYICENQDSISSKLKECCEKPLLEKSHCIAEVENDEMPADLPSLAADFVESKDVCKNYAEAKDVFLGMFLYEYARRHPDYSVVLLLRLAKTYETTLEKCCAAADPHECYAKVFDEFKPLVEEPQNLIKQNCELFEQLGEYKFQNALLVRYTKKVPQVSTPTLVEVSRNLGKVGSKCCKHPEAKRMPCAEDYLSVVLNQLCVLHEKTPVSDRVTKCCTESLVNRRPCFSALEVDETYVPKEFNAETFTFHADICTLSEKERQIKKQTALVELVKHKPKATKEQLKAVMDDFAAFVEKCCKADDKETCFAEEGKKLVAASQAALGL

SEQ ID NO: 267 - protein, 917 aa, Artificial Sequence
  hCPN1 variant
VTFRHHRYDDLVRTLYKVQNECPGITRVYSIGRSVEGRHLYVLEFSDHPGIHEPNEPEVKYVGNMHGNEALGRELMLQLSEFLCEEFRNRNQRIVQLIQDTRIHILPSMNPDGYEVAAAQGPNKPGYLVGRNNANGVDLNRNFPDLNTYIYYNEKYGGPNRHLPLPDNWKSQVEPETRAVIRWMHSFDFKLSANLHGGAVVANYPYDKSFEHRVRGVRRTASTPTPDDEKFQKLAKVYSYAHGWMFQGWNCGDYFPDGITNGASWYSLSKGMQDFNYLHTDSYEITLELSCDKFPPEEELQREWLGNKEALIQFLEQVHNGSSGGSSGGSSGDAHKSEVAHRFKDLGEENFKALVLIAFAQYLQQCPFEDHVKLVNEVTEFAKTCVADESAENCDKSLHTLFGDKLCTVATLRETYGEMADCCAKQEPERNECFLQHKDDNPNLPRLVRPEVDVMCTAFHDNEETFLKKYLYEIARRHPYFYAPELLFFAKRYKAAFTECCQAADKAACLLPKLDELRDEGKASSAKQRLKCASLQKFGERAFKAWAVARLSQRFPKAEFAEVSKLVTDLTKVHTECCHGDLLECADDRADLAKYICENQDSISSKLKECCEKPLLEKSHCIAEVENDEMPADLPSLAADFVESKDVCKNYAEAKDVFLGMFLYEYARRHPDYSVVLLLRLAKTYETTLEKCCAAADPHECYAKVFDEFKPLVEEPQNLIKQNCELFEQLGEYKFQNALLVRYTKKVPQVSTPTLVEVSRNLGKVGSKCCKHPEAKRMPCAEDYLSVVLNQLCVLHEKTPVSDRVTKCCTESLVNRRPCFSALEVDETYVPKEFNAETFTFHADICTLSEKERQIKKQTALVELVKHKPKATKEQLKAVMDDFAAFVEKCCKADDKETCFAEEGKKLVAASQAALGL

SEQ ID NO: 268 - protein, 995 aa, Artificial Sequence
  hCPN1 variant
VTFRHHRYDDLVRTLYKVQNECPGITRVYSIGRSVEGRHLYVLEFSDHPGIHEPLEPEVKYVGNMHGNEALGRELMLQLSEFLCEEFRNRNQRIVQLIQDTRIHILPSMNPDGYEVAAAQGPNKPGYLVGRNNANGVDLNRNFPDLNTYIYYNEKYGGPNHHLPLPDNWKSQVEPETRAVIRWMHSFNFVLSANLHGGDVVANYPYDKSFEHRVRGVRRTASTPTPDDKLFQKLAKVYSYAHGWMFQGWNCGDYFPDGITNGASWYSLSKGMQDFNYLHTNCFEITLELSCDKFPPEEELQREWLGNREALIQFLEQVHQGIKGMVLDENYNNLANAVISVSGINHDVTSGDHGDYFRLLLPGIYTVSATAPGYDPETVTVTVGPAEPTLVNFHLKRSGSSGGSSGGSSGDAHKSEVAHRFKDLGEENFKALVLIAFAQYLQQCPFEDHVKLVNEVTEFAKTCVADESAENCDKSLHTLFGDKLCTVATLRETYGEMADCCAKQEPERNECFLQHKDDNPNLPRLVRPEVDVMCTAFHDNEETFLKKYLYEIARRHPYFYAPELLFFAKRYKAAFTECCQAADKAACLLPKLDELRDEGKASSAKQRLKCASLQKFGERAFKAWAVARLSQRFPKAEFAEVSKLVTDLTKVHTECCHGDLLECADDRADLAKYICENQDSISSKLKECCEKPLLEKSHCIAEVENDEMPADLPSLAADFVESKDVCKNYAEAKDVFLGMFLYEYARRHPDYSVVLLLRLAKTYETTLEKCCAAADPHECYAKVFDEFKPLVEEPQNLIKQNCELFEQLGEYKFQNALLVRYTKKVPQVSTPTLVEVSRNLGKVGSKCCKHPEAKRMPCAEDYLSVVLNQLCVLHEKTPVSDRVTKCCTESLVNRRPCFSALEVDETYVPKEFNAETFTFHADICTLSEKERQIKKQTALVELVKHKPKATKEQLKAVMDDFAAFVEKCCKADDKETCFAEEGKKLVAASQAALGL

SEQ ID NO: 269 - protein, 995 aa, Artificial Sequence
  hCPN1 variant
VTFRHHRYDDLVRTLYKVQNECPGITRVYSIGRSVEGRHLYVLEFSDHPGIHEPLEPEVKYVGNMHGNEALGRELMLQLSEFLCEEFRNRNQRIVQLIQDTRIHILPSMNPDGYEVAAAQDPNKPGYLVGRNNANGVDLNRNFPDLNTYIYYNEKYGGPNHHLPLPDNWKSQVEPETRAVIRWMHSFNFVLSANLHGGDVVANYPYDKSFEHRVRGVRRTASTPTPDDKLFQKLAKVYSYAHGWMFQGWNCGDYFPDGITNGASWYSLSKGMQDFNYLHTNCFEITLELSCDKFPPEEELQREWLGNREALIQFLEQVHQGIKGMVLDENYNNLANAVISVSGINHDVTSGDHGDYFRLLLPGIYTVSATAPGYDPETVTVTVGPAEPTLVNFHLKRSGSSGGSSGGSSGDAHKSEVAHRFKDLGEENFKALVLIAFAQYLQQCPFEDHVKLVNEVTEFAKTCVADESAENCDKSLHTLFGDKLCTVATLRETYGEMADCCAKQEPERNECFLQHKDDNPNLPRLVRPEVDVMCTAFHDNEETFLKKYLYEIARRHPYFYAPELLFFAKRYKAAFTECCQAADKAACLLPKLDELRDEGKASSAKQRLKCASLQKFGERAFKAWAVARLSQRFPKAEFAEVSKLVTDLTKVHTECCHGDLLECADDRADLAKYICENQDSISSKLKECCEKPLLEKSHCIAEVENDEMPADLPSLAADFVESKDVCKNYAEAKDVFLGMFLYEYARRHPDYSVVLLLRLAKTYETTLEKCCAAADPHECYAKVFDEFKPLVEEPQNLIKQNCELFEQLGEYKFQNALLVRYTKKVPQVSTPTLVEVSRNLGKVGSKCCKHPEAKRMPCAEDYLSVVLNQLCVLHEKTPVSDRVTKCCTESLVNRRPCFSALEVDETYVPKEFNAETFTFHADICTLSEKERQIKKQTALVELVKHKPKATKEQLKAVMDDFAAFVEKCCKADDKETCFAEEGKKLVAASQAALGL

SEQ ID NO: 270 - protein, 995 aa, Artificial Sequence
  hCPN1 variant
VTFRHHRYDDLVRTLYKVQNECPGITRVYSIGRSVEGRHLYVLEFSDHPGIHEPLEPEVKYVGNMHGNEALGRELMLQLSEFLCEEFRNRNQRIVQLIQDTRIHILPSMNPDGYEVAAAQGPDKPGYLVGRNNANGVDLNRNFPDLNTYIYYNEKYGGPNHHLPLPDNWKSQVEPETRAVIRWMHSFNFVLSANLHGGDVVANYPYDKSFEHRVRGVRRTASTPTPDDKLFQKLAKVYSYAHGWMFQGWNCGDYFPDGITNGASWYSLSKGMQDFNYLHTNCFEITLELSCDKFPPEEELQREWLGNREALIQFLEQVHQGIKGMVLDENYNNLANAVISVSGINHDVTSGDHGDYFRLLLPGIYTVSATAPGYDPETVTVTVGPAEPTLVNFHLKRSGSSGGSSGGSSGDAHKSEVAHRFKDLGEENFKALVLIAFAQYLQQCPFEDHVKLVNEVTEFAKTCVADESAENCDKSLHTLFGDKLCTVATLRETYGEMADCCAKQEPERNECFLQHKDDNPNLPRLVRPEVDVMCTAFHDNEETFLKKYLYEIARRHPYFYAPELLFFAKRYKAAFTECCQAADKAACLLPKLDELRDEGKASSAKQRLKCASLQKFGERAFKAWAVARLSQRFPKAEFAEVSKLVTDLTKVHTECCHGDLLECADDRADLAKYICENQDSISSKLKECCEKPLLEKSHCIAEVENDEMPADLPSLAADFVESKDVCKNYAEAKDVFLGMFLYEYARRHPDYSVVLLLRLAKTYETTLEKCCAAADPHECYAKVFDEFKPLVEEPQNLIKQNCELFEQLGEYKFQNALLVRYTKKVPQVSTPTLVEVSRNLGKVGSKCCKHPEAKRMPCAEDYLSVVLNQLCVLHEKTPVSDRVTKCCTESLVNRRPCFSALEVDETYVPKEFNAETFTFHADICTLSEKERQIKKQTALVELVKHKPKATKEQLKAVMDDFAAFVEKCCKADDKETCFAEEGKKLVAASQAALGL

SEQ ID NO: 271 - protein, 995 aa, Artificial Sequence
  hCPN1 variant
VTFRHHRYDDLVRTLYKVQNECPGITRVYSIGRSVEGRHLYVLEFSDHPGIHEPLEPEVKYVGNMHGNEALGRELMLQLSEFLCEEFRNRNQRIVQLIQDTRIHILPSMNPDGYEVAAAQDPDKPGYLVGRNNANGVDLNRNFPDLNTYIYYNEKYGGPNHHLPLPDNWKSQVEPETRAVIRWMHSFNFVLSANLHGGDVVANYPYDKSFEHRVRGVRRTASTPTPDDKLFQKLAKVYSYAHGWMFQGWNCGDYFPDGITNGASWYSLSKGMQDFNYLHTNCFEITLELSCDKFPPEEELQREWLGNREALIQFLEQVHQGIKGMVLDENYNNLANAVISVSGINHDVTSGDHGDYFRLLLPGIYTVSATAPGYDPETVTVTVGPAEPTLVNFHLKRSGSSGGSSGGSSGDAHKSEVAHRFKDLGEENFKALVLIAFAQYLQQCPFEDHVKLVNEVTEFAKTCVADESAENCDKSLHTLFGDKLCTVATLRETYGEMADCCAKQEPERNECFLQHKDDNPNLPRLVRPEVDVMCTAFHDNEETFLKKYLYEIARRHPYFYAPELLFFAKRYKAAFTECCQAADKAACLLPKLDELRDEGKASSAKQRLKCASLQKFGERAFKAWAVARLSQRFPKAEFAEVSKLVTDLTKVHTECCHGDLLECADDRADLAKYICENQDSISSKLKECCEKPLLEKSHCIAEVENDEMPADLPSLAADFVESKDVCKNYAEAKDVFLGMFLYEYARRHPDYSVVLLLRLAKTYETTLEKCCAAADPHECYAKVFDEFKPLVEEPQNLIKQNCELFEQLGEYKFQNALLVRYTKKVPQVSTPTLVEVSRNLGKVGSKCCKHPEAKRMPCAEDYLSVVLNQLCVLHEKTPVSDRVTKCCTESLVNRRPCFSALEVDETYVPKEFNAETFTFHADICTLSEKERQIKKQTALVELVKHKPKATKEQLKAVMDDFAAFVEKCCKADDKETCFAEEGKKLVAASQAALGL

SEQ ID NO: 272 - protein, 995 aa, Artificial Sequence
  hCPN1 variant
VTFRHHRYDDLVRTLYKVQNECPGITRVYSIGRSVEGRHLYVLEFSDHPGIHEPLEPEVKYVGNMHGNEALGRELMLQLSEFLCEEFRNRNQRIVQLIQDTRIHILPSMNPDGYEVAAAQDPDIPGYLVGRNNANGVDLNRNFPDLNTYIYYNEKYGGPNHHLPLPDNWKSQVEPETRAVIRWMHSFNFVLSANLHGGDVVANYPYDKSFEHRVRGVRRTASTPTPDDKLFQKLAKVYSYAHGWMFQGWNCGDYFPDGITNGASWYSLSKGMQDFNYLHTNCFEITLELSCDKFPPEEELQREWLGNREALIQFLEQVHQGIKGMVLDENYNNLANAVISVSGINHDVTSGDHGDYFRLLLPGIYTVSATAPGYDPETVTVTVGPAEPTLVNFHLKRSGSSGGSSGGSSGDAHKSEVAHRFKDLGEENFKALVLIAFAQYLQQCPFEDHVKLVNEVTEFAKTCVADESAENCDKSLHTLFGDKLCTVATLRETYGEMADCCAKQEPERNECFLQHKDDNPNLPRLVRPEVDVMCTAFHDNEETFLKKYLYEIARRHPYFYAPELLFFAKRYKAAFTECCQAADKAACLLPKLDELRDEGKASSAKQRLKCASLQKFGERAFKAWAVARLSQRFPKAEFAEVSKLVTDLTKVHTECCHGDLLECADDRADLAKYICENQDSISSKLKECCEKPLLEKSHCIAEVENDEMPADLPSLAADFVESKDVCKNYAEAKDVFLGMFLYEYARRHPDYSVVLLLRLAKTYETTLEKCCAAADPHECYAKVFDEFKPLVEEPQNLIKQNCELFEQLGEYKFQNALLVRYTKKVPQVSTPTLVEVSRNLGKVGSKCCKHPEAKRMPCAEDYLSVVLNQLCVLHEKTPVSDRVTKCCTESLVNRRPCFSALEVDETYVPKEFNAETFTFHADICTLSEKERQIKKQTALVELVKHKPKATKEQLKAVMDDFAAFVEKCCKADDKETCFAEEGKKLVAASQAALGL

SEQ ID NO: 273 - protein, 995 aa, Artificial Sequence
  hCPN1 variant
VTFRHHRYDDLVRTLYKVQNECPGITRVYSIGRSVEGRHLYVLEFSDHPGIHEPLEPEVKYVGNMKGNEALGRELMLQLSEFLCEEFRNRNQRIVQLIQDTRIHILPSMNPDGYEVAAAQGPNKPGYLVGRNNANGVDLNRNFPDLNTYIYYNEKYGGPNHHLPLPDNWKSQVEPETRAVIRWMHSFNFVLSANLHGGAVVANYPYDKSFEHRVRGVRRTASTPTPDDKLFQKLAKVYSYAHGWMFQGWNCGDYFPDGITNGASWYSLSKGMQDFNYLHTNCFEITLELSCDKFPPEEELQREWLGNREALIQFLEQVHQGIKGMVLDENYNNLANAVISVSGINHDVTSGDHGDYFRLLLPGIYTVSATAPGYDPETVTVTVGPAEPTLVNFHLKRSGSSGGSSGGSSGDAHKSEVAHRFKDLGEENFKALVLIAFAQYLQQCPFEDHVKLVNEVTEFAKTCVADESAENCDKSLHTLFGDKLCTVATLRETYGEMADCCAKQEPERNECFLQHKDDNPNLPRLVRPEVDVMCTAFHDNEETFLKKYLYEIARRHPYFYAPELLFFAKRYKAAFTECCQAADKAACLLPKLDELRDEGKASSAKQRLKCASLQKFGERAFKAWAVARLSQRFPKAEFAEVSKLVTDLTKVHTECCHGDLLECADDRADLAKYICENQDSISSKLKECCEKPLLEKSHCIAEVENDEMPADLPSLAADFVESKDVCKNYAEAKDVFLGMFLYEYARRHPDYSVVLLLRLAKTYETTLEKCCAAADPHECYAKVFDEFKPLVEEPQNLIKQNCELFEQLGEYKFQNALLVRYTKKVPQVSTPTLVEVSRNLGKVGSKCCKHPEAKRMPCAEDYLSVVLNQLCVLHEKTPVSDRVTKCCTESLVNRRPCFSALEVDETYVPKEFNAETFTFHADICTLSEKERQIKKQTALVELVKHKPKATKEQLKAVMDDFAAFVEKCCKADDKETCFAEEGKKLVAASQAALGL

SEQ ID NO: 274 - protein, 995 aa, Artificial Sequence
  hCPN1 variant
VTFRHHRYDDLVRTLYKVQNECPGITRVYSIGRSVEGRHLYVLEFSDHPGIHEPLEPEVKYVGNMHGNEALGRELMLELSEFLCEEFRNRNQRIVQLIQDTRIHILPSMNPDGYEVAAAQGPNKPGYLVGRNNANGVDLNRNFPDLNTYIYYNEKYGGPNHHLPLPDNWKSQVEPETRAVIRWMHSFNFVLSANLHGGAVVANYPYDKSFEHRVRGVRRTASTPTPDDKLFQKLAKVYSYAHGWMFQGWNCGDYFPDGITNGASWYSLSKGMQDFNYLHTNCFEITLELSCDKFPPEEELQREWLGNREALIQFLEQVHQGIKGMVLDENYNNLANAVISVSGINHDVTSGDHGDYFRLLLPGIYTVSATAPGYDPETVTVTVGPAEPTLVNFHLKRSGSSGGSSGGSSGDAHKSEVAHRFKDLGEENFKALVLIAFAQYLQQCPFEDHVKLVNEVTEFAKTCVADESAENCDKSLHTLFGDKLCTVATLRETYGEMADCCAKQEPERNECFLQHKDDNPNLPRLVRPEVDVMCTAFHDNEETFLKKYLYEIARRHPYFYAPELLFFAKRYKAAFTECCQAADKAACLLPKLDELRDEGKASSAKQRLKCASLQKFGERAFKAWAVARLSQRFPKAEFAEVSKLVTDLTKVHTECCHGDLLECADDRADLAKYICENQDSISSKLKECCEKPLLEKSHCIAEVENDEMPADLPSLAADFVESKDVCKNYAEAKDVFLGMFLYEYARRHPDYSVVLLLRLAKTYETTLEKCCAAADPHECYAKVFDEFKPLVEEPQNLIKQNCELFEQLGEYKFQNALLVRYTKKVPQVSTPTLVEVSRNLGKVGSKCCKHPEAKRMPCAEDYLSVVLNQLCVLHEKTPVSDRVTKCCTESLVNRRPCFSALEVDETYVPKEFNAETFTFHADICTLSEKERQIKKQTALVELVKHKPKATKEQLKAVMDDFAAFVEKCCKADDKETCFAEEGKKLVAASQAALGL

SEQ ID NO: 275 - protein, 995 aa, Artificial Sequence
  hCPN1 variant
VTFRHHRYDDLVRTLYKVQNECPGITRVYSIGRSVEGRHLYVLEFSDHPGIHEPLEPEVKYVGNMHGNEALGRELMLQLSEFLCEEFRNRNQRIVQLIQDTRIHILPSMNPDGYEVAAAQGPNKEGYLVGRNNANGVDLNRNFPDLNTYIYYNEKYGGPNHHLPLPDNWKSQVEPETRAVIRWMHSFNFVLSANLHGGAVVANYPYDKSFEHRVRGVRRTASTPTPDDKLFQKLAKVYSYAHGWMFQGWNCGDYFPDGITNGASWYSLSKGMQDFNYLHTNCFEITLELSCDKFPPEEELQREWLGNREALIQFLEQVHQGIKGMVLDENYNNLANAVISVSGINHDVTSGDHGDYFRLLLPGIYTVSATAPGYDPETVTVTVGPAEPTLVNFHLKRSGSSGGSSGGSSGDAHKSEVAHRFKDLGEENFKALVLIAFAQYLQQCPFEDHVKLVNEVTEFAKTCVADESAENCDKSLHTLFGDKLCTVATLRETYGEMADCCAKQEPERNECFLQHKDDNPNLPRLVRPEVDVMCTAFHDNEETFLKKYLYEIARRHPYFYAPELLFFAKRYKAAFTECCQAADKAACLLPKLDELRDEGKASSAKQRLKCASLQKFGERAFKAWAVARLSQRFPKAEFAEVSKLVTDLTKVHTECCHGDLLECADDRADLAKYICENQDSISSKLKECCEKPLLEKSHCIAEVENDEMPADLPSLAADFVESKDVCKNYAEAKDVFLGMFLYEYARRHPDYSVVLLLRLAKTYETTLEKCCAAADPHECYAKVFDEFKPLVEEPQNLIKQNCELFEQLGEYKFQNALLVRYTKKVPQVSTPTLVEVSRNLGKVGSKCCKHPEAKRMPCAEDYLSVVLNQLCVLHEKTPVSDRVTKCCTESLVNRRPCFSALEVDETYVPKEFNAETFTFHADICTLSEKERQIKKQTALVELVKHKPKATKEQLKAVMDDFAAFVEKCCKADDKETCFAEEGKKLVAASQAALGL

SEQ ID NO: 276 - protein, 995 aa, Artificial Sequence
  hCPN1 variant
VTFRHHRYDDLVRTLYKVQNECPGITRVYSIGRSVEGRHLYVLEFSDHPGIHEPLEPEVKYVGNMHGNEALGRELMLQLSEFLCEEFRNRNQRIVQLIQDTRIHILPSMNPDGYEVAAAQGPNKDGYLVGRNNANGVDLNRNFPDLNTYIYYNEKYGGPNHHLPLPDNWKSQVEPETRAVIRWMHSFNFVLSANLHGGAVVANYPYDKSFEHRVRGVRRTASTPTPDDKLFQKLAKVYSYAHGWMFQGWNCGDYFPDGITNGASWYSLSKGMQDFNYLHTNCFEITLELSCDKFPPEEELQREWLGNREALIQFLEQVHQGIKGMVLDENYNNLANAVISVSGINHDVTSGDHGDYFRLLLPGIYTVSATAPGYDPETVTVTVGPAEPTLVNFHLKRSGSSGGSSGGSSGDAHKSEVAHRFKDLGEENFKALVLIAFAQYLQQCPFEDHVKLVNEVTEFAKTCVADESAENCDKSLHTLFGDKLCTVATLRETYGEMADCCAKQEPERNECFLQHKDDNPNLPRLVRPEVDVMCTAFHDNEETFLKKYLYEIARRHPYFYAPELLFFAKRYKAAFTECCQAADKAACLLPKLDELRDEGKASSAKQRLKCASLQKFGERAFKAWAVARLSQRFPKAEFAEVSKLVTDLTKVHTECCHGDLLECADDRADLAKYICENQDSISSKLKECCEKPLLEKSHCIAEVENDEMPADLPSLAADFVESKDVCKNYAEAKDVFLGMFLYEYARRHPDYSVVLLLRLAKTYETTLEKCCAAADPHECYAKVFDEFKPLVEEPQNLIKQNCELFEQLGEYKFQNALLVRYTKKVPQVSTPTLVEVSRNLGKVGSKCCKHPEAKRMPCAEDYLSVVLNQLCVLHEKTPVSDRVTKCCTESLVNRRPCFSALEVDETYVPKEFNAETFTFHADICTLSEKERQIKKQTALVELVKHKPKATKEQLKAVMDDFAAFVEKCCKADDKETCFAEEGKKLVAASQAALGL

SEQ ID NO: 277 - protein, 995 aa, Artificial Sequence
  hCPN1 variant
VTFRHHRYDDLVRTLYKVQNECPGITRVYSIGRSVEGRHLYVLEFSDHPGIHEPLEPEVKYVGNMHGNEALGRELMLQLSEFLCEEFRNRNQRIVQLIQDTRIHILPSMNPDGYEVAAAQGPNKPGYLVGRNNANGVKLNRNFPDLNTYIYYNEKYGGPNHHLPLPDNWKSQVEPETRAVIRWMHSFNFVLSANLHGGAVVANYPYDKSFEHRVRGVRRTASTPTPDDKLFQKLAKVYSYAHGWMFQGWNCGDYFPDGITNGASWYSLSKGMQDFNYLHTNCFEITLELSCDKFPPEEELQREWLGNREALIQFLEQVHQGIKGMVLDENYNNLANAVISVSGINHDVTSGDHGDYFRLLLPGIYTVSATAPGYDPETVTVTVGPAEPTLVNFHLKRSGSSGGSSGGSSGDAHKSEVAHRFKDLGEENFKALVLIAFAQYLQQCPFEDHVKLVNEVTEFAKTCVADESAENCDKSLHTLFGDKLCTVATLRETYGEMADCCAKQEPERNECFLQHKDDNPNLPRLVRPEVDVMCTAFHDNEETFLKKYLYEIARRHPYFYAPELLFFAKRYKAAFTECCQAADKAACLLPKLDELRDEGKASSAKQRLKCASLQKFGERAFKAWAVARLSQRFPKAEFAEVSKLVTDLTKVHTECCHGDLLECADDRADLAKYICENQDSISSKLKECCEKPLLEKSHCIAEVENDEMPADLPSLAADFVESKDVCKNYAEAKDVFLGMFLYEYARRHPDYSVVLLLRLAKTYETTLEKCCAAADPHECYAKVFDEFKPLVEEPQNLIKQNCELFEQLGEYKFQNALLVRYTKKVPQVSTPTLVEVSRNLGKVGSKCCKHPEAKRMPCAEDYLSVVLNQLCVLHEKTPVSDRVTKCCTESLVNRRPCFSALEVDETYVPKEFNAETFTFHADICTLSEKERQIKKQTALVELVKHKPKATKEQLKAVMDDFAAFVEKCCKADDKETCFAEEGKKLVAASQAALGL

SEQ ID NO: 278 - protein, 995 aa, Artificial Sequence
  hCPN1 variant
VTFRHHRYDDLVRTLYKVQNECPGITRVYSIGRSVEGRHLYVLEFSDHPGIHEPLEPEVKYVGNMHGNEALGRELMLQLSEFLCEEFRNRNQRIVQLIQDTRIHILPSMNPDGYEVAAAQGPNKPGYLVGRNNANGVDLNRNFPDLNTYIYYNEKYGGPNHHLPLPDNWKSQVEPETRAVIRWMHSFNFVLSANLHGGAVVANYPYDKSFEHRVRGVRRTASTPTPDDKLFQKLAKVYSYAHGWMFQGWNCGDYFPDGITNGASWYSLSKGMQDFNYLHTNCFEITLELSCDKFPEEEELQREWLGNREALIQFLEQVHQGIKGMVLDENYNNLANAVISVSGINHDVTSGDHGDYFRLLLPGIYTVSATAPGYDPETVTVTVGPAEPTLVNFHLKRSGSSGGSSGGSSGDAHKSEVAHRFKDLGEENFKALVLIAFAQYLQQCPFEDHVKLVNEVTEFAKTCVADESAENCDKSLHTLFGDKLCTVATLRETYGEMADCCAKQEPERNECFLQHKDDNPNLPRLVRPEVDVMCTAFHDNEETFLKKYLYEIARRHPYFYAPELLFFAKRYKAAFTECCQAADKAACLLPKLDELRDEGKASSAKQRLKCASLQKFGERAFKAWAVARLSQRFPKAEFAEVSKLVTDLTKVHTECCHGDLLECADDRADLAKYICENQDSISSKLKECCEKPLLEKSHCIAEVENDEMPADLPSLAADFVESKDVCKNYAEAKDVFLGMFLYEYARRHPDYSVVLLLRLAKTYETTLEKCCAAADPHECYAKVFDEFKPLVEEPQNLIKQNCELFEQLGEYKFQNALLVRYTKKVPQVSTPTLVEVSRNLGKVGSKCCKHPEAKRMPCAEDYLSVVLNQLCVLHEKTPVSDRVTKCCTESLVNRRPCFSALEVDETYVPKEFNAETFTFHADICTLSEKERQIKKQTALVELVKHKPKATKEQLKAVMDDFAAFVEKCCKADDKETCFAEEGKKLVAASQAALGL

SEQ ID NO: 279 - protein, 995 aa, Artificial Sequence
  hCPN1 variant
VTFRHHRYDDLVRTLYKVQNECPGITRVYSIGRSVEGRHLYVLEFSDHPGIHEPLEPEVKYVGNMHGNEALGRELMLQLSEFLCEEFRNRNQRIVQLIQDTRIHILPSMNPDGYEVAAAQGPNKPGYLVGRNNANGVDLNRNFPDLNTYIYYNEKYGGPNHHLPLPDNWKSQVEPETRAVIRWMHSFNFVLSANLHGGAVVANYPYDKSFEHRVRGVRRTASTPTPDDKLFQKLAKVYSYAHGWMFQGWNCGDYFPDGITNGASWYSLSKGMQDFNYLHTNCFEITLELSCDKFPGEEELQREWLGNREALIQFLEQVHQGIKGMVLDENYNNLANAVISVSGINHDVTSGDHGDYFRLLLPGIYTVSATAPGYDPETVTVTVGPAEPTLVNFHLKRSGSSGGSSGGSSGDAHKSEVAHRFKDLGEENFKALVLIAFAQYLQQCPFEDHVKLVNEVTEFAKTCVADESAENCDKSLHTLFGDKLCTVATLRETYGEMADCCAKQEPERNECFLQHKDDNPNLPRLVRPEVDVMCTAFHDNEETFLKKYLYEIARRHPYFYAPELLFFAKRYKAAFTECCQAADKAACLLPKLDELRDEGKASSAKQRLKCASLQKFGERAFKAWAVARLSQRFPKAEFAEVSKLVTDLTKVHTECCHGDLLECADDRADLAKYICENQDSISSKLKECCEKPLLEKSHCIAEVENDEMPADLPSLAADFVESKDVCKNYAEAKDVFLGMFLYEYARRHPDYSVVLLLRLAKTYETTLEKCCAAADPHECYAKVFDEFKPLVEEPQNLIKQNCELFEQLGEYKFQNALLVRYTKKVPQVSTPTLVEVSRNLGKVGSKCCKHPEAKRMPCAEDYLSVVLNQLCVLHEKTPVSDRVTKCCTESLVNRRPCFSALEVDETYVPKEFNAETFTFHADICTLSEKERQIKKQTALVELVKHKPKATKEQLKAVMDDFAAFVEKCCKADDKETCFAEEGKKLVAASQAALGL

SEQ ID NO: 280 - protein, 995 aa, Artificial Sequence
  hCPN1 variant
VTFRHHRYDDLVRTLYKVQNECPGITRVYSIGRSVEGRHLYVLEFSDHPGIHEPLEPEVKYVGNMHGNEALGRELMLQLSEFLCEEFRNRNQRIVQLIQDTRIHILPSMNPDGYEVAAAQGPNKPGYLVGRNNANGVDLNRNFPDLNTYIYYNEKYGGPNHHLPLPDNWKSQVEPETRAVIRWMHSFNFVLSANLHGGAVVANYPYDKSFEHRVRGVRRTASTPTPDDKLFQKLAKVYSYAHGWMFQGWNCGDYFPDGITNGASWYSLSKGMQDFNYLHTNCFEITLELSCDKFPPEGELQREWLGNREALIQFLEQVHQGIKGMVLDENYNNLANAVISVSGINHDVTSGDHGDYFRLLLPGIYTVSATAPGYDPETVTVTVGPAEPTLVNFHLKRSGSSGGSSGGSSGDAHKSEVAHRFKDLGEENFKALVLIAFAQYLQQCPFEDHVKLVNEVTEFAKTCVADESAENCDKSLHTLFGDKLCTVATLRETYGEMADCCAKQEPERNECFLQHKDDNPNLPRLVRPEVDVMCTAFHDNEETFLKKYLYEIARRHPYFYAPELLFFAKRYKAAFTECCQAADKAACLLPKLDELRDEGKASSAKQRLKCASLQKFGERAFKAWAVARLSQRFPKAEFAEVSKLVTDLTKVHTECCHGDLLECADDRADLAKYICENQDSISSKLKECCEKPLLEKSHCIAEVENDEMPADLPSLAADFVESKDVCKNYAEAKDVFLGMFLYEYARRHPDYSVVLLLRLAKTYETTLEKCCAAADPHECYAKVFDEFKPLVEEPQNLIKQNCELFEQLGEYKFQNALLVRYTKKVPQVSTPTLVEVSRNLGKVGSKCCKHPEAKRMPCAEDYLSVVLNQLCVLHEKTPVSDRVTKCCTESLVNRRPCFSALEVDETYVPKEFNAETFTFHADICTLSEKERQIKKQTALVELVKHKPKATKEQLKAVMDDFAAFVEKCCKADDKETCFAEEGKKLVAASQAALGL

SEQ ID NO: 281 - protein, 995 aa, Artificial Sequence
  hCPN1 variant
VTFRHHRYDDLVRTLYKVQNECPGITRVYSIGRSVEGRHLYVLEFSDHPGIHEPLEPEVKYVGNMHGNEALGRELMLQLSEFLCEEFRNRNQRIVQLIQDTRIHILPSMNPDGYEVAAAQGPNKPGYLVGRNNANGVDLNRNFPDLNTYIYYNEKYGGPNHHLPLPDNWKSQVEPETRAVIRWMHSFNFVLSANLHGGAVVANYPYDKSFEHRVRGVRRTASTPTPDDKLFQKLAKVYSYAHGWMFQGWNCGDYFPDGITNGASWYSLSKGMQDFNYLHTNCFEITLELSCDKFPPEEEEQREWLGNREALIQFLEQVHQGIKGMVLDENYNNLANAVISVSGINHDVTSGDHGDYFRLLLPGIYTVSATAPGYDPETVTVTVGPAEPTLVNFHLKRSGSSGGSSGGSSGDAHKSEVAHRFKDLGEENFKALVLIAFAQYLQQCPFEDHVKLVNEVTEFAKTCVADESAENCDKSLHTLFGDKLCTVATLRETYGEMADCCAKQEPERNECFLQHKDDNPNLPRLVRPEVDVMCTAFHDNEETFLKKYLYEIARRHPYFYAPELLFFAKRYKAAFTECCQAADKAACLLPKLDELRDEGKASSAKQRLKCASLQKFGERAFKAWAVARLSQRFPKAEFAEVSKLVTDLTKVHTECCHGDLLECADDRADLAKYICENQDSISSKLKECCEKPLLEKSHCIAEVENDEMPADLPSLAADFVESKDVCKNYAEAKDVFLGMFLYEYARRHPDYSVVLLLRLAKTYETTLEKCCAAADPHECYAKVFDEFKPLVEEPQNLIKQNCELFEQLGEYKFQNALLVRYTKKVPQVSTPTLVEVSRNLGKVGSKCCKHPEAKRMPCAEDYLSVVLNQLCVLHEKTPVSDRVTKCCTESLVNRRPCFSALEVDETYVPKEFNAETFTFHADICTLSEKERQIKKQTALVELVKHKPKATKEQLKAVMDDFAAFVEKCCKADDKETCFAEEGKKLVAASQAALGL

SEQ ID NO: 282 - protein, 995 aa, Artificial Sequence
  hCPN1 variant
VTFRHHRYDDLVRTLYKVQNECPGITRVYSIGRSVEGRHLYVLEFSDHPGIHEPLEPEVKYVGNMHGNEALGRELMLQLSEFLCEEFRNRNQRIVQLIQDTRIHILPSMNPDGYEVAAAQGPNKPGYLVGRNNANGVDLNRNFPDLNTYIYYNEKYGGPNHHLPLPDNWKSQVEPETRAVIRWMHSFNFVLSANLHGGAVVANYPYDKSFEHRVRGVRRTASTPTPDDKLFQKLAKVYSYAHGWMFQGWNCGDYFPDGITNGASWYSLSKGMQDFNYLHTNCFEITLELSCDKFPPEEELRREWLGNREALIQFLEQVHQGIKGMVLDENYNNLANAVISVSGINHDVTSGDHGDYFRLLLPGIYTVSATAPGYDPETVTVTVGPAEPTLVNFHLKRSGSSGGSSGGSSGDAHKSEVAHRFKDLGEENFKALVLIAFAQYLQQCPFEDHVKLVNEVTEFAKTCVADESAENCDKSLHTLFGDKLCTVATLRETYGEMADCCAKQEPERNECFLQHKDDNPNLPRLVRPEVDVMCTAFHDNEETFLKKYLYEIARRHPYFYAPELLFFAKRYKAAFTECCQAADKAACLLPKLDELRDEGKASSAKQRLKCASLQKFGERAFKAWAVARLSQRFPKAEFAEVSKLVTDLTKVHTECCHGDLLECADDRADLAKYICENQDSISSKLKECCEKPLLEKSHCIAEVENDEMPADLPSLAADFVESKDVCKNYAEAKDVFLGMFLYEYARRHPDYSVVLLLRLAKTYETTLEKCCAAADPHECYAKVFDEFKPLVEEPQNLIKQNCELFEQLGEYKFQNALLVRYTKKVPQVSTPTLVEVSRNLGKVGSKCCKHPEAKRMPCAEDYLSVVLNQLCVLHEKTPVSDRVTKCCTESLVNRRPCFSALEVDETYVPKEFNAETFTFHADICTLSEKERQIKKQTALVELVKHKPKATKEQLKAVMDDFAAFVEKCCKADDKETCFAEEGKKLVAASQAALGL

SEQ ID NO: 283 - protein, 995 aa, Artificial Sequence
  hCPN1 variant
VTFRHHRYDDLVRTLYKVQNECPGITRVYSIGRSVEGRHLYVLEFSDHPGIHEPLEPEVKYVGNMHGNEALGRELMLQLSEFLCEEFRNRNQRIVQLIQDTRIHILPSMNPDGYEVAAAQGPNKPGYLVGRNNANGVDLNRNFPDLNTYIYYNEKYGGPNHHLPLPDNWKSQVEPETRAVIRWMHSFNFVLSANLHGGAVVANYPYDKSFEHRVRGVRRTASTPTPDDKLFQKLAKVYSYAHGWMFQGWNCGDYFPDGITNGASWYSLSKGMQDFNYLHTNCFEITLELSCDKFPPEEELEREWLGNREALIQFLEQVHQGIKGMVLDENYNNLANAVISVSGINHDVTSGDHGDYFRLLLPGIYTVSATAPGYDPETVTVTVGPAEPTLVNFHLKRSGSSGGSSGGSSGDAHKSEVAHRFKDLGEENFKALVLIAFAQYLQQCPFEDHVKLVNEVTEFAKTCVADESAENCDKSLHTLFGDKLCTVATLRETYGEMADCCAKQEPERNECFLQHKDDNPNLPRLVRPEVDVMCTAFHDNEETFLKKYLYEIARRHPYFYAPELLFFAKRYKAAFTECCQAADKAACLLPKLDELRDEGKASSAKQRLKCASLQKFGERAFKAWAVARLSQRFPKAEFAEVSKLVTDLTKVHTECCHGDLLECADDRADLAKYICENQDSISSKLKECCEKPLLEKSHCIAEVENDEMPADLPSLAADFVESKDVCKNYAEAKDVFLGMFLYEYARRHPDYSVVLLLRLAKTYETTLEKCCAAADPHECYAKVFDEFKPLVEEPQNLIKQNCELFEQLGEYKFQNALLVRYTKKVPQVSTPTLVEVSRNLGKVGSKCCKHPEAKRMPCAEDYLSVVLNQLCVLHEKTPVSDRVTKCCTESLVNRRPCFSALEVDETYVPKEFNAETFTFHADICTLSEKERQIKKQTALVELVKHKPKATKEQLKAVMDDFAAFVEKCCKADDKETCFAEEGKKLVAASQAALGL

SEQ ID NO: 284 - protein, 995 aa, Artificial Sequence
  hCPN1 variant
VTFRHHRYDDLVRTLYKVQNECPGITRVYSIGRSVEGRHLYVLEFSDHPGIHEPLEPEVKYVGNMHGNEALGRELMLQLSEFLCEEFRNRNQRIVQLIQDTRIHILPSMNPDGYEVAAAQGPNKPGYLVGRNNANGVDLNRNFPDLNTYIYYNEKYGGPNHHLPLPDNWKSQVEPETRAVIRWMHSFNFVLSANLHGGAVVANYPYDKSFEHRVRGVRRTASTPTPDDKLFQKLAKVYSYAHGWMFQGWNCGDYFPDGITNGASWYSLSKGMQDFNYLHTNCFEITLELSCDKFPPEEELQEEWLGNREALIQFLEQVHQGIKGMVLDENYNNLANAVISVSGINHDVTSGDHGDYFRLLLPGIYTVSATAPGYDPETVTVTVGPAEPTLVNFHLKRSGSSGGSSGGSSGDAHKSEVAHRFKDLGEENFKALVLIAFAQYLQQCPFEDHVKLVNEVTEFAKTCVADESAENCDKSLHTLFGDKLCTVATLRETYGEMADCCAKQEPERNECFLQHKDDNPNLPRLVRPEVDVMCTAFHDNEETFLKKYLYEIARRHPYFYAPELLFFAKRYKAAFTECCQAADKAACLLPKLDELRDEGKASSAKQRLKCASLQKFGERAFKAWAVARLSQRFPKAEFAEVSKLVTDLTKVHTECCHGDLLECADDRADLAKYICENQDSISSKLKECCEKPLLEKSHCIAEVENDEMPADLPSLAADFVESKDVCKNYAEAKDVFLGMFLYEYARRHPDYSVVLLLRLAKTYETTLEKCCAAADPHECYAKVFDEFKPLVEEPQNLIKQNCELFEQLGEYKFQNALLVRYTKKVPQVSTPTLVEVSRNLGKVGSKCCKHPEAKRMPCAEDYLSVVLNQLCVLHEKTPVSDRVTKCCTESLVNRRPCFSALEVDETYVPKEFNAETFTFHADICTLSEKERQIKKQTALVELVKHKPKATKEQLKAVMDDFAAFVEKCCKADDKETCFAEEGKKLVAASQAALGL

SEQ ID NO: 285 - protein, 995 aa, Artificial Sequence
  hCPN1 variant
VTFRHHRYDDLVRTLYKVQNECPGITRVYSIGRSVEGRHLYVLEFSDHPGIHEPLEPEVKYVGNMHGNEALGRELMLQLSEFLCEEFRNRNQRIVQLIQDTRIHILPSMNPDGYEVAAAQGPNKPGYLVGRNNANGVDLNRNFPDLNTYIYYNEKYGGPNHHLPLPDNWKSQVEPETRAVIRWMHSFNFVLSANLHGGAVVANYPYDKSFEHRVRGVRRTASTPTPDDKLFQKLAKVYSYAHGWMFQGWNCGDYFPDGITNGASWYSLSKGMQDFNYLHTNCFEITLELSCNKFPPEEELQREWLGNREALIQFLEQVHQGIKGMVLDENYNNLANAVISVSGINHDVTSGDHGDYFRLLLPGIYTVSATAPGYDPETVTVTVGPAEPTLVNFHLKRSGSSGGSSGGSSGDAHKSEVAHRFKDLGEENFKALVLIAFAQYLQQCPFEDHVKLVNEVTEFAKTCVADESAENCDKSLHTLFGDKLCTVATLRETYGEMADCCAKQEPERNECFLQHKDDNPNLPRLVRPEVDVMCTAFHDNEETFLKKYLYEIARRHPYFYAPELLFFAKRYKAAFTECCQAADKAACLLPKLDELRDEGKASSAKQRLKCASLQKFGERAFKAWAVARLSQRFPKAEFAEVSKLVTDLTKVHTECCHGDLLECADDRADLAKYICENQDSISSKLKECCEKPLLEKSHCIAEVENDEMPADLPSLAADFVESKDVCKNYAEAKDVFLGMFLYEYARRHPDYSVVLLLRLAKTYETTLEKCCAAADPHECYAKVFDEFKPLVEEPQNLIKQNCELFEQLGEYKFQNALLVRYTKKVPQVSTPTLVEVSRNLGKVGSKCCKHPEAKRMPCAEDYLSVVLNQLCVLHEKTPVSDRVTKCCTESLVNRRPCFSALEVDETYVPKEFNAETFTFHADICTLSEKERQIKKQTALVELVKHKPKATKEQLKAVMDDFAAFVEKCCKADDKETCFAEEGKKLVAASQAALGL

SEQ ID NO: 286 - protein, 995 aa, Artificial Sequence
  hCPN1 variant
VTFRHHRYDDLVRTLYKVQNECPGITRVYSIGRSVEGRHLYVLEFSDHPGIHEPLEPEVKYVGNMHGNEALGRELMLQLSEFLCEEFRNRNQRIVQLIQDTRIHILPSMNPDGYEVAAAQGPNKPGYLVGRNNANGVDLNRNFPDLNTYIYYNEKYGGPNHHLPLPDNWKSQVEPETRAVIRWMHSFNCVLSANLHGGAVVANYPYDKSFEHRVRGVRRTASTPTPDDKLFQKLAKVYSYAHGWMFQGWNCGDYFPDGITNGASWYSLSKGMQDFNYLHTNCFEITLELSCDKFPPEEELQREWLGNREALIQFLEQVHQGIKGMVLDENYNNLANAVISVSGINHDVTSGDHGDYFRLLLPGIYTVSATAPGYDPETVTVTVGPAEPTLVNFHLKRSGSSGGSSGGSSGDAHKSEVAHRFKDLGEENFKALVLIAFAQYLQQCPFEDHVKLVNEVTEFAKTCVADESAENCDKSLHTLFGDKLCTVATLRETYGEMADCCAKQEPERNECFLQHKDDNPNLPRLVRPEVDVMCTAFHDNEETFLKKYLYEIARRHPYFYAPELLFFAKRYKAAFTECCQAADKAACLLPKLDELRDEGKASSAKQRLKCASLQKFGERAFKAWAVARLSQRFPKAEFAEVSKLVTDLTKVHTECCHGDLLECADDRADLAKYICENQDSISSKLKECCEKPLLEKSHCIAEVENDEMPADLPSLAADFVESKDVCKNYAEAKDVFLGMFLYEYARRHPDYSVVLLLRLAKTYETTLEKCCAAADPHECYAKVFDEFKPLVEEPQNLIKQNCELFEQLGEYKFQNALLVRYTKKVPQVSTPTLVEVSRNLGKVGSKCCKHPEAKRMPCAEDYLSVVLNQLCVLHEKTPVSDRVTKCCTESLVNRRPCFSALEVDETYVPKEFNAETFTFHADICTLSEKERQIKKQTALVELVKHKPKATKEQLKAVMDDFAAFVEKCCKADDKETCFAEEGKKLVAASQAALGL

SEQ ID NO: 287 - protein, 1011 aa, Artificial Sequence
  hCPN1 variant
VTFRHHRYDDLVRTLYKVQNECPGITRVYSIGRSVEGRHLYVLEFSDHPGIHEPLEPEVKYVGNMHGNEALGRELMLQLSEFLCEEFRNRNQRIVQLIQDTRIHILPSMNPDGYEVAAAQGPNKPGYLVGRNNANGVDLNRNFPDLNTYIYYNEKYGGPNHHLPLPDNWKSQVEPETRAVIRWMHSFNFVLSANLHGGAVVANYPYDKSFEHRVRGVRRTASTPTPDDKLFQKLAKVYSYAHGWMFQGWNCGDYFPDGITNGASWYSLSKGMQDFNYLHTNCFEITLELSCDKFPPEEELQREWLGNREALIQFLEQVHQGIKGMVLDENYNNLANAVISVSGINHDVTSGDHGDYFRLLLPGIYTVSATAPGYDPETVTVTVGPAEPTLVNFHLKRSGSSGGSSGGSSGDAHKSEVAHRFKDLGEENFKALVLIAFAQYLQQCPFEDHVKLVNEVTEFAKTCVADESAENCDKSLHTLFGDKLCTVATLRETYGEMADCCAKQEPERNECFLQHKDDNPNLPRLVRPEVDVMCTAFHDNEETFLKKYLYEIARRHPYFYAPELLFFAKRYKAAFTECCQAADKAACLLPKLDELRDEGKASSAKQRLKCASLQKFGERAFKAWAVARLSQRFPKAEFAEVSKLVTDLTKVHTECCHGDLLECADDRADLAKYICENQDSISSKLKECCEKPLLEKSHCIAEVENDEMPADLPSLAADFVESKDVCKNYAEAKDVFLGMFLYEYARRHPDYSVVLLLRLAKTYETTLEKCCAAADPHECYAKVFDEFKPLVEEPQNLIKQNCELFEQLGEYKFQNALLVRYTKKVPQVSTPTLVEVSRNLGKVGSKCCKHPEAKRMPCAEDYLSVVLNQLCVLHEKTPVSDRVTKCCTESLVNRRPCFSALEVDETYVPKEFNAETFTFHADICTLSEKERQIKKQTALVELVKHKPKATKEQLKAVMDDFAAFVEKCCKADDKETCFAEEGKKLVAASQAALGLGGGGHHHHHHHHHHLE

SEQ ID NO: 288 - protein, 1036 aa, Artificial Sequence
  hCPN1 variant
VTFRHHRYDDLVRTLYKVQNECPSVTRVYSIGRSVEGRHLYVLEFSDRPGIHEPLEPEVKYVANMHGNEALGRELMLQLSEFLCEEFRNRNQRIVRLIQDTRIHILPSMNPDGYEVAAAQGPNKLGYLVGRNNANGVDLNRNFPDLNTYIYYNEKSGGPNHHLPLPDNWKSQVEPETRAVIRWMHSFNFVLSANLHGGAVVANYPYDRSFEHPVRGVRRPANTPTPDDKLFRKLAKIYSYAHGWMYQGWNCGDYFPDGIINGASWYSLSKGMQDFNYLHTNCFDITLELSCNKFPPQEELQREWLGNREALIQFLEEVHQGIKGMVLDENYNNLANAVISVSGINHDVTSGDHGDYFRLLLPGTYTVTAKAPGFDPQTETVTVGPAEPTLVNFYLKRSISQVSSVGRAPSRRHGVGAKAQPQAARKKEMEMRQLQRGPAGSSGGSSGGSSGDAHKSEVAHRFKDLGEENFKALVLIAFAQYLQQCPFEDHVKLVNEVTEFAKTCVADESAENCDKSLHTLFGDKLCTVATLRETYGEMADCCAKQEPERNECFLQHKDDNPNLPRLVRPEVDVMCTAFHDNEETFLKKYLYEIARRHPYFYAPELLFFAKRYKAAFTECCQAADKAACLLPKLDELRDEGKASSAKQRLKCASLQKFGERAFKAWAVARLSQRFPKAEFAEVSKLVTDLTKVHTECCHGDLLECADDRADLAKYICENQDSISSKLKECCEKPLLEKSHCIAEVENDEMPADLPSLAADFVESKDVCKNYAEAKDVFLGMFLYEYARRHPDYSVVLLLRLAKTYETTLEKCCAAADPHECYAKVFDEFKPLVEEPQNLIKQNCELFEQLGEYKFQNALLVRYTKKVPQVSTPTLVEVSRNLGKVGSKCCKHPEAKRMPCAEDYLSVVLNQLCVLHEKTPVSDRVTKCCTESLVNRRPCFSALEVDETYVPKEFNAETFTFHADICTLSEKERQIKKQTALVELVKHKPKATKEQLKAVMDDFAAFVEKCCKADDKETCFAEEGKKLVAASQAALGL

SEQ ID NO: 289 - protein, 1040 aa, Artificial Sequence
  hCPN1 variant
VTFRHHRYDDLVRMLYKVHNECPHITRVYSIGRSVKGRHLYVLEFSDYPGIHEPLEPEVKYVGNMHGNEVLGRELLLQLSEFLCEEFRNRNQRIVRLVEDTRIHIMPSMNPDGYEVAAAAQERDISGYLVGRNNANGVDLNRNFPDLNTYIYYNEKNGGPNHHFPLPDNWKSQVEPETQAVIQWIRSFNFVLSANLHGGAVVANYPYDKSLGHRVRGFRRTANTPTPDDKLFQKLAKIYSYAHGWMHQGWNCGDYFPDGITNGASWYSLSKGMQDFNYLHTNCFEITLELSCDKFPLQGELQREWLGNREALIQFLEQVHQGIKGMVRDENYNNLADAVISVGGINHDVTSGAHGDYFRLLLPGTYTVTATAPGFDPETVSVTVGPAEPKLVNFQLKRSTPQAAPKRRIPNSGHRGRVLPKKVQPRAARKKETMMKQPQRGPAGSSGGSSGGSSGDAHKSEVAHRFKDLGEENFKALVLIAFAQYLQQCPFEDHVKLVNEVTEFAKTCVADESAENCDKSLHTLFGDKLCTVATLRETYGEMADCCAKQEPERNECFLQHKDDNPNLPRLVRPEVDVMCTAFHDNEETFLKKYLYEIARRHPYFYAPELLFFAKRYKAAFTECCQAADKAACLLPKLDELRDEGKASSAKQRLKCASLQKFGERAFKAWAVARLSQRFPKAEFAEVSKLVTDLTKVHTECCHGDLLECADDRADLAKYICENQDSISSKLKECCEKPLLEKSHCIAEVENDEMPADLPSLAADFVESKDVCKNYAEAKDVFLGMFLYEYARRHPDYSVVLLLRLAKTYETTLEKCCAAADPHECYAKVFDEFKPLVEEPQNLIKQNCELFEQLGEYKFQNALLVRYTKKVPQVSTPTLVEVSRNLGKVGSKCCKHPEAKRMPCAEDYLSVVLNQLCVLHEKTPVSDRVTKCCTESLVNRRPCFSALEVDETYVPKEFNAETFTFHADICTLSEKERQIKKQTALVELVKHKPKATKEQLKAVMDDFAAFVEKCCKADDKETCFAEEGKKLVAASQAALGL

SEQ ID NO: 290 - protein, 1034 aa, Artificial Sequence
  hCPN1 variant
VTFRHHRYDDLVRTLYKVHNQCPDITRLYNIGRSVKGRYLYVLEFSDYPGIHEPLEPEVKYVGNMHGNEVLGRELLLQLSEFLCEEFRNRNQRILRLIQDTRIHILPSMNPDGYEVAAAQGPNMSGYLVGRNNANGVDLNRNFPDLNTYFYYNSKNGGPNHHLPLPDNWKSQVEPETRAVIQWIRSLNFVLSANMHGGAVVANYPYDKSLEHRFRGPHRTSNSPTPDDELFQTLAKVYSYAHGWMHQGWNCGDYFPDGITNGASWYSLSKGMQDFNYLHTNCFEITLELSCDKFPRQEELQREWLGNREALIQFLEQVHQGIKGMVLDENSNNLTGAVISVTGINHDVTSGEHGDYFRLLLPGTYSVTAKAPGYDPKTVTVTVGPAGPTVVDFQLKRSSSQVYPVQRAPGRGQGGRAKQPRTSRKKDPATKRHRGPAGSSGGSSGGSSGDAHKSEVAHRFKDLGEENFKALVLIAFAQYLQQCPFEDHVKLVNEVTEFAKTCVADESAENCDKSLHTLFGDKLCTVATLRETYGEMADCCAKQEPERNECFLQHKDDNPNLPRLVRPEVDVMCTAFHDNEETFLKKYLYEIARRHPYFYAPELLFFAKRYKAAFTECCQAADKAACLLPKLDELRDEGKASSAKQRLKCASLQKFGERAFKAWAVARLSQRFPKAEFAEVSKLVTDLTKVHTECCHGDLLECADDRADLAKYICENQDSISSKLKECCEKPLLEKSHCIAEVENDEMPADLPSLAADFVESKDVCKNYAEAKDVFLGMFLYEYARRHPDYSVVLLLRLAKTYETTLEKCCAAADPHECYAKVFDEFKPLVEEPQNLIKQNCELFEQLGEYKFQNALLVRYTKKVPQVSTPTLVEVSRNLGKVGSKCCKHPEAKRMPCAEDYLSVVLNQLCVLHEKTPVSDRVTKCCTESLVNRRPCFSALEVDETYVPKEFNAETFTFHADICTLSEKERQIKKQTALVELVKHKPKATKEQLKAVMDDFAAFVEKCCKADDKETCFAEEGKKLVAASQAALGL

SEQ ID NO: 291 - protein, 1033 aa, Artificial Sequence
  hCPN1 variant
VTFQHHRYDDLMRTLYKVHNECPHITRVYSIGRSVKGRHLYALEFSDFPGMHELLEPEFKYVGNMHGNEVLGRELLIQLCEFLCEEYRQRNERIVRLIHNTRIHILPSMNPDGYEVAADQGPDTNGYLTGRNNANGVDLNRNFPDLNTYMYYNEKSGGPNHHIPLPDNWRNQVEPETEAIIQWMESINFVLSANLHGGAVVANYPYDKSREHRVRGFRRTADTPTPDDKLFRKLAKGYSYAHGWMHLGWNCGDYFPDGITNGASWYSVSKGMQDFNYLHTNCFDITLELSCNKFPRQEELQREWLGNLEALISFLEEVHHGIKGMILDENNNGIAGAVISISGIAHDVTSGKQGDYFRLLLPGTYVVTATAPGYGSETMTVTVGPAEPKQVNFQLSIDTTKESTEQKTPVKAPSGKTLLKKMASREVGKETRRSRPGSSGGSSGGSSGDAHKSEVAHRFKDLGEENFKALVLIAFAQYLQQCPFEDHVKLVNEVTEFAKTCVADESAENCDKSLHTLFGDKLCTVATLRETYGEMADCCAKQEPERNECFLQHKDDNPNLPRLVRPEVDVMCTAFHDNEETFLKKYLYEIARRHPYFYAPELLFFAKRYKAAFTECCQAADKAACLLPKLDELRDEGKASSAKQRLKCASLQKFGERAFKAWAVARLSQRFPKAEFAEVSKLVTDLTKVHTECCHGDLLECADDRADLAKYICENQDSISSKLKECCEKPLLEKSHCIAEVENDEMPADLPSLAADFVESKDVCKNYAEAKDVFLGMFLYEYARRHPDYSVVLLLRLAKTYETTLEKCCAAADPHECYAKVFDEFKPLVEEPQNLIKQNCELFEQLGEYKFQNALLVRYTKKVPQVSTPTLVEVSRNLGKVGSKCCKHPEAKRMPCAEDYLSVVLNQLCVLHEKTPVSDRVTKCCTESLVNRRPCFSALEVDETYVPKEFNAETFTFHADICTLSEKERQIKKQTALVELVKHKPKATKEQLKAVMDDFAAFVEKCCKADDKETCFAEEGKKLVAASQAALGL

SEQ ID NO: 292 - protein, 1030 aa, Artificial Sequence
  hCPN1 variant
LSFLHHRYEEMVQALFRVQSQCPYVTRIYSIGRSVEGRHLYVLEFSDYPGIHEALEPEFKYVGNMHGNEVLGRELLLQLSEFLCEEYRRGNERISRLIHDTRIHIMPSMNPDGYEVAAKQGPDSNGYLTGRNNANGVDLNRNFPDLNTFMYYSREISGPNHHIPLPDNWKSQVEPETLAVIQWISSYNFVLSANLHGGAVVANYPYDKSQDQRFRSHRRTVNTPTPDDKLFQKLAKTYSYAHGWMHRGWNCGDYFADGITNGASWYSLSKGMQDFNYLYTNCFEITLELSCNKFPPEEDLERQWMANREALVAFMEEVHQGIKGMVSDENNNGIAGAVISVQGISHDITSGDMGDYFRLLLPGTYTVTASAEGYQPQTVTTTVGPAAPSLVHFQLKQDVVKKAPERKASGTRTNNKALQKKVVPRATRRGTQRGSSGGSSGGSSGDAHKSEVAHRFKDLGEENFKALVLIAFAQYLQQCPFEDHVKLVNEVTEFAKTCVADESAENCDKSLHTLFGDKLCTVATLRETYGEMADCCAKQEPERNECFLQHKDDNPNLPRLVRPEVDVMCTAFHDNEETFLKKYLYEIARRHPYFYAPELLFFAKRYKAAFTECCQAADKAACLLPKLDELRDEGKASSAKQRLKCASLQKFGERAFKAWAVARLSQRFPKAEFAEVSKLVTDLTKVHTECCHGDLLECADDRADLAKYICENQDSISSKLKECCEKPLLEKSHCIAEVENDEMPADLPSLAADFVESKDVCKNYAEAKDVFLGMFLYEYARRHPDYSVVLLLRLAKTYETTLEKCCAAADPHECYAKVFDEFKPLVEEPQNLIKQNCELFEQLGEYKFQNALLVRYTKKVPQVSTPTLVEVSRNLGKVGSKCCKHPEAKRMPCAEDYLSVVLNQLCVLHEKTPVSDRVTKCCTESLVNRRPCFSALEVDETYVPKEFNAETFTFHADICTLSEKERQIKKQTALVELVKHKPKATKEQLKAVMDDFAAFVEKCCKADDKETCFAEEGKKLVAASQAALGL

SEQ ID NO: 293 - protein, 995 aa, Artificial Sequence
  hCPN1 variant
VTFRHHRYDDLVRTLYKVQNECPGITRVYSIGRSVEGRHLYVLEFSDHPGIHEPLEPEVKYVGNMHGNEALGRELMLQLSEFLCEEFRNRNQRIVQLIQDTRIHILPSMNPDGYEVAAAQGPNKPGYLVGRNNANGVDLNRNFPDLNTYIYYNEKYGGPNHHLPLPDNWKSQVEPETRAVIRWMHSFNFVLSANLHGGAVVANYPYDKSFEHRVRGVRRTASTPTPDDKLFQKLAKVYSYAHGWMFQGWNCGDYFPDGITNGASWYSLSKGMQDFNYLHTNCFEITLELSCDKFPPEEELQREWLGNKEALIQFLEQVHQGIKGMVLDQNYNNLANAVISVSGINHDVTSGDHGDYFRLLLPGIYTVSATAPGYDPETVTVTVGPAEPTLVNFHLKRSGSSGGSSGGSSGDAHKSEVAHRFKDLGEENFKALVLIAFAQYLQQCPFEDHVKLVNEVTEFAKTCVADESAENCDKSLHTLFGDKLCTVATLRETYGEMADCCAKQEPERNECFLQHKDDNPNLPRLVRPEVDVMCTAFHDNEETFLKKYLYEIARRHPYFYAPELLFFAKRYKAAFTECCQAADKAACLLPKLDELRDEGKASSAKQRLKCASLQKFGERAFKAWAVARLSQRFPKAEFAEVSKLVTDLTKVHTECCHGDLLECADDRADLAKYICENQDSISSKLKECCEKPLLEKSHCIAEVENDEMPADLPSLAADFVESKDVCKNYAEAKDVFLGMFLYEYARRHPDYSVVLLLRLAKTYETTLEKCCAAADPHECYAKVFDEFKPLVEEPQNLIKQNCELFEQLGEYKFQNALLVRYTKKVPQVSTPTLVEVSRNLGKVGSKCCKHPEAKRMPCAEDYLSVVLNQLCVLHEKTPVSDRVTKCCTESLVNRRPCFSALEVDETYVPKEFNAETFTFHADICTLSEKERQIKKQTALVELVKHKPKATKEQLKAVMDDFAAFVEKCCKADDKETCFAEEGKKLVAASQAALGL

SEQ ID NO: 294 - protein, 983 aa, Artificial Sequence
  hCPN1 variant
VTFRHHRYDDLVRTLYKVQNECPGITRVYSIGRSVEGRHLYVLEFSDHPGIHEPLEPEVKYVGNMHGNEALGRELMLQLSEFLCEEFRNRNQRIVQLIQDTRIHILPSMNPDGYEVAAAQGPNKPGYLVGRNNANGVDLNRNFPDLNTYIYYNEKYGGPNHHLPLPDNWKSQVEPETRAVIRWMHSFNFVLSANLHGGAVVANYPYDKSFEHRVRGVRRTASTPTPDDKLFQKLAKVYSYAHGWMFQGWNCGDYFPDGITNGASWYSLSKGMQDFNYLHTNCFEITLELSCDKFPPEEELQREWLGNREALIQFLEQVHQGIKGMVLDENYNNLANAVISVSGINHDVTSGDHGDYFRLLLPGIYTVSATAPGYDPETVTVTVGPAEPTLVNFHLKRSDAHKSEVAHRFKDLGEENFKALVLIAFAQYLQQCPFEDHVKLVNEVTEFAKTCVADESAENCDKSLHTLFGDKLCTVATLRETYGEMADCCAKQEPERNECFLQHKDDNPNLPRLVRPEVDVMCTAFHDNEETFLKKYLYEIARRHPYFYAPELLFFAKRYKAAFTECCQAADKAACLLPKLDELRDEGKASSAKQRLKCASLQKFGERAFKAWAVARLSQRFPKAEFAEVSKLVTDLTKVHTECCHGDLLECADDRADLAKYICENQDSISSKLKECCEKPLLEKSHCIAEVENDEMPADLPSLAADFVESKDVCKNYAEAKDVFLGMFLYEYARRHPDYSVVLLLRLAKTYETTLEKCCAAADPHECYAKVFDEFKPLVEEPQNLIKQNCELFEQLGEYKFQNALLVRYTKKVPQVSTPTLVEVSRNLGKVGSKCCKHPEAKRMPCAEDYLSVVLNQLCVLHEKTPVSDRVTKCCTESLVNRRPCFSALEVDETYVPKEFNAETFTFHADICTLSEKERQIKKQTALVELVKHKPKATKEQLKAVMDDFAAFVEKCCKADDKETCFAEEGKKLVAASQAALGL

SEQ ID NO: 295 - protein, 987 aa, Artificial Sequence
  hCPN1 variant
VTFRHHRYDDLVRTLYKVQNECPGITRVYSIGRSVEGRHLYVLEFSDHPGIHEPLEPEVKYVGNMHGNEALGRELMLQLSEFLCEEFRNRNQRIVQLIQDTRIHILPSMNPDGYEVAAAQGPNKPGYLVGRNNANGVDLNRNFPDLNTYIYYNEKYGGPNHHLPLPDNWKSQVEPETRAVIRWMHSFNFVLSANLHGGAVVANYPYDKSFEHRVRGVRRTASTPTPDDKLFQKLAKVYSYAHGWMFQGWNCGDYFPDGITNGASWYSLSKGMQDFNYLHTNCFEITLELSCDKFPPEEELQREWLGNREALIQFLEQVHQGIKGMVLDENYNNLANAVISVSGINHDVTSGDHGDYFRLLLPGIYTVSATAPGYDPETVTVTVGPAEPTLVNFHLKRSGSSGDAHKSEVAHRFKDLGEENFKALVLIAFAQYLQQCPFEDHVKLVNEVTEFAKTCVADESAENCDKSLHTLFGDKLCTVATLRETYGEMADCCAKQEPERNECFLQHKDDNPNLPRLVRPEVDVMCTAFHDNEETFLKKYLYEIARRHPYFYAPELLFFAKRYKAAFTECCQAADKAACLLPKLDELRDEGKASSAKQRLKCASLQKFGERAFKAWAVARLSQRFPKAEFAEVSKLVTDLTKVHTECCHGDLLECADDRADLAKYICENQDSISSKLKECCEKPLLEKSHCIAEVENDEMPADLPSLAADFVESKDVCKNYAEAKDVFLGMFLYEYARRHPDYSVVLLLRLAKTYETTLEKCCAAADPHECYAKVFDEFKPLVEEPQNLIKQNCELFEQLGEYKFQNALLVRYTKKVPQVSTPTLVEVSRNLGKVGSKCCKHPEAKRMPCAEDYLSVVLNQLCVLHEKTPVSDRVTKCCTESLVNRRPCFSALEVDETYVPKEFNAETFTFHADICTLSEKERQIKKQTALVELVKHKPKATKEQLKAVMDDFAAFVEKCCKADDKETCFAEEGKKLVAASQAALGL

SEQ ID NO: 296 - protein, 991 aa, Artificial Sequence
  hCPN1 variant
VTFRHHRYDDLVRTLYKVQNECPGITRVYSIGRSVEGRHLYVLEFSDHPGIHEPLEPEVKYVGNMHGNEALGRELMLQLSEFLCEEFRNRNQRIVQLIQDTRIHILPSMNPDGYEVAAAQGPNKPGYLVGRNNANGVDLNRNFPDLNTYIYYNEKYGGPNHHLPLPDNWKSQVEPETRAVIRWMHSFNFVLSANLHGGAVVANYPYDKSFEHRVRGVRRTASTPTPDDKLFQKLAKVYSYAHGWMFQGWNCGDYFPDGITNGASWYSLSKGMQDFNYLHTNCFEITLELSCDKFPPEEELQREWLGNREALIQFLEQVHQGIKGMVLDENYNNLANAVISVSGINHDVTSGDHGDYFRLLLPGIYTVSATAPGYDPETVTVTVGPAEPTLVNFHLKRSGSSGGSSGDAHKSEVAHRFKDLGEENFKALVLIAFAQYLQQCPFEDHVKLVNEVTEFAKTCVADESAENCDKSLHTLFGDKLCTVATLRETYGEMADCCAKQEPERNECFLQHKDDNPNLPRLVRPEVDVMCTAFHDNEETFLKKYLYEIARRHPYFYAPELLFFAKRYKAAFTECCQAADKAACLLPKLDELRDEGKASSAKQRLKCASLQKFGERAFKAWAVARLSQRFPKAEFAEVSKLVTDLTKVHTECCHGDLLECADDRADLAKYICENQDSISSKLKECCEKPLLEKSHCIAEVENDEMPADLPSLAADFVESKDVCKNYAEAKDVFLGMFLYEYARRHPDYSVVLLLRLAKTYETTLEKCCAAADPHECYAKVFDEFKPLVEEPQNLIKQNCELFEQLGEYKFQNALLVRYTKKVPQVSTPTLVEVSRNLGKVGSKCCKHPEAKRMPCAEDYLSVVLNQLCVLHEKTPVSDRVTKCCTESLVNRRPCFSALEVDETYVPKEFNAETFTFHADICTLSEKERQIKKQTALVELVKHKPKATKEQLKAVMDDFAAFVEKCCKADDKETCFAEEGKKLVAASQAALGL

SEQ ID NO: 297 - protein, 995 aa, Artificial Sequence
  hCPN1 variant
VTFRHHRYDDLVRTLYKVQNECPGITRVYSIGRSVEGRHLYVLEFSDHPGIHEPLEPEVGYIGNMHGNEALGRELMLQLSEFLCEEFRNRNQRIVQLIQDTRIHILPSMNPDGYEVAAAQGPNKPGYLVGRNNANGVDLNRNFPDLNTYIYYNEKYGGPNHHLPLPDNWKSQVEPETRAIIRWMHSFNFVLMANLHGGAVVANYPYDKSFEHRVRGVRRTASTPTPDDKLFQKLAKVYSYAHGWMFQGWNCGDYFPDGITNGASWYSLSKGLQDFIYLHTNCFIITLELSCDKFPPEEELQREWLGNREALIQFLEQVHQGIKGMVLDENYNNLANAVISVSGINHDVTSGDHGDYFRLLLPGIYTVSATAPGYDPETVTVTVGPAEPTLVNFHLKRSGSSGGSSGGSSGDAHKSEVAHRFKDLGEENFKALVLIAFAQYLQQCPFEDHVKLVNEVTEFAKTCVADESAENCDKSLHTLFGDKLCTVATLRETYGEMADCCAKQEPERNECFLQHKDDNPNLPRLVRPEVDVMCTAFHDNEETFLKKYLYEIARRHPYFYAPELLFFAKRYKAAFTECCQAADKAACLLPKLDELRDEGKASSAKQRLKCASLQKFGERAFKAWAVARLSQRFPKAEFAEVSKLVTDLTKVHTECCHGDLLECADDRADLAKYICENQDSISSKLKECCEKPLLEKSHCIAEVENDEMPADLPSLAADFVESKDVCKNYAEAKDVFLGMFLYEYARRHPDYSVVLLLRLAKTYETTLEKCCAAADPHECYAKVFDEFKPLVEEPQNLIKQNCELFEQLGEYKFQNALLVRYTKKVPQVSTPTLVEVSRNLGKVGSKCCKHPEAKRMPCAEDYLSVVLNQLCVLHEKTPVSDRVTKCCTESLVNRRPCFSALEVDETYVPKEFNAETFTFHADICTLSEKERQIKKQTALVELVKHKPKATKEQLKAVMDDFAAFVEKCCKADDKETCFAEEGKKLVAASQAALGL

SEQ ID NO: 298 - protein, 990 aa, Artificial Sequence
  hCPN1 variant
VTFRHHRYDDLVRTLYKVQNECPGITRVYSIGRSVEGRHLYVLEFSDHPGIHEPLEPEVKYVGNMHGNEALGRELMLQLSEFLCEEFRNRNQRIVQLIQDTRIHILPSMNPDGYEVAAAQGPNKPGYLVGRNNANGVDLNRNFPDLNTYIYYNEKYGGPNHHLPLPDNWKSQVEPETRAVIRWMHSFNFVLSANLHGGAVVANYPYDKSFEHRVRGVRRTASTPTPDDKLFQKLAKVYSYAHGWMFQGWNCGDYFPDGITNGASWYSLSKGMQDFNYLHTNCFEITLELSCDKFPPEEELQREWLGNREALIQFLEQVHQGIKGMVLDENYNNLANAVISVSGINHDVTSGDHGDYFRLLLPGIYTVSATAPGYDPETVTVTVGPAEPTLVNFHLKRSENLYFQGDAHKSEVAHRFKDLGEENFKALVLIAFAQYLQQCPFEDHVKLVNEVTEFAKTCVADESAENCDKSLHTLFGDKLCTVATLRETYGEMADCCAKQEPERNECFLQHKDDNPNLPRLVRPEVDVMCTAFHDNEETFLKKYLYEIARRHPYFYAPELLFFAKRYKAAFTECCQAADKAACLLPKLDELRDEGKASSAKQRLKCASLQKFGERAFKAWAVARLSQRFPKAEFAEVSKLVTDLTKVHTECCHGDLLECADDRADLAKYICENQDSISSKLKECCEKPLLEKSHCIAEVENDEMPADLPSLAADFVESKDVCKNYAEAKDVFLGMFLYEYARRHPDYSVVLLLRLAKTYETTLEKCCAAADPHECYAKVFDEFKPLVEEPQNLIKQNCELFEQLGEYKFQNALLVRYTKKVPQVSTPTLVEVSRNLGKVGSKCCKHPEAKRMPCAEDYLSVVLNQLCVLHEKTPVSDRVTKCCTESLVNRRPCFSALEVDETYVPKEFNAETFTFHADICTLSEKERQIKKQTALVELVKHKPKATKEQLKAVMDDFAAFVEKCCKADDKETCFAEEGKKLVAASQAALGL

SEQ ID NO: 299 - protein, 994 aa, Artificial Sequence
  hCPN1 variant
VTFRHHRYDDLVRTLYKVQNECPGITRVYSIGRSVEGRHLYVLEFSDHPGIHEPLEPEVKYVGNMHGNEALGRELMLQLSEFLCEEFRNRNQRIVQLIQDTRIHILPSMNPDGYEVAAAQGPNKPGYLVGRNNANGVDLNRNFPDLNTYIYYNEKYGGPNHHLPLPDNWKSQVEPETRAVIRWMHSFNFVLSANLHGGAVVANYPYDKSFEHRVRGVRRTASTPTPDDKLFQKLAKVYSYAHGWMFQGWNCGDYFPDGITNGASWYSLSKGMQDFNYLHTNCFEITLELSCDKFPPEEELQREWLGNREALIQFLEQVHQGIKGMVLDENYNNLANAVISVSGINHDVTSGDHGDYFRLLLPGIYTVSATAPGYDPETVTVTVGPAEPTLVNFHLKRSENLYFQGGSSGDAHKSEVAHRFKDLGEENFKALVLIAFAQYLQQCPFEDHVKLVNEVTEFAKTCVADESAENCDKSLHTLFGDKLCTVATLRETYGEMADCCAKQEPERNECFLQHKDDNPNLPRLVRPEVDVMCTAFHDNEETFLKKYLYEIARRHPYFYAPELLFFAKRYKAAFTECCQAADKAACLLPKLDELRDEGKASSAKQRLKCASLQKFGERAFKAWAVARLSQRFPKAEFAEVSKLVTDLTKVHTECCHGDLLECADDRADLAKYICENQDSISSKLKECCEKPLLEKSHCIAEVENDEMPADLPSLAADFVESKDVCKNYAEAKDVFLGMFLYEYARRHPDYSVVLLLRLAKTYETTLEKCCAAADPHECYAKVFDEFKPLVEEPQNLIKQNCELFEQLGEYKFQNALLVRYTKKVPQVSTPTLVEVSRNLGKVGSKCCKHPEAKRMPCAEDYLSVVLNQLCVLHEKTPVSDRVTKCCTESLVNRRPCFSALEVDETYVPKEFNAETFTFHADICTLSEKERQIKKQTALVELVKHKPKATKEQLKAVMDDFAAFVEKCCKADDKETCFAEEGKKLVAASQAALGL

SEQ ID NO: 300 - protein, 998 aa, Artificial Sequence
  hCPN1 variant
VTFRHHRYDDLVRTLYKVQNECPGITRVYSIGRSVEGRHLYVLEFSDHPGIHEPLEPEVKYVGNMHGNEALGRELMLQLSEFLCEEFRNRNQRIVQLIQDTRIHILPSMNPDGYEVAAAQGPNKPGYLVGRNNANGVDLNRNFPDLNTYIYYNEKYGGPNHHLPLPDNWKSQVEPETRAVIRWMHSFNFVLSANLHGGAVVANYPYDKSFEHRVRGVRRTASTPTPDDKLFQKLAKVYSYAHGWMFQGWNCGDYFPDGITNGASWYSLSKGMQDFNYLHTNCFEITLELSCDKFPPEEELQREWLGNREALIQFLEQVHQGIKGMVLDENYNNLANAVISVSGINHDVTSGDHGDYFRLLLPGIYTVSATAPGYDPETVTVTVGPAEPTLVNFHLKRSENLYFQGGSSGGSSGDAHKSEVAHRFKDLGEENFKALVLIAFAQYLQQCPFEDHVKLVNEVTEFAKTCVADESAENCDKSLHTLFGDKLCTVATLRETYGEMADCCAKQEPERNECFLQHKDDNPNLPRLVRPEVDVMCTAFHDNEETFLKKYLYEIARRHPYFYAPELLFFAKRYKAAFTECCQAADKAACLLPKLDELRDEGKASSAKQRLKCASLQKFGERAFKAWAVARLSQRFPKAEFAEVSKLVTDLTKVHTECCHGDLLECADDRADLAKYICENQDSISSKLKECCEKPLLEKSHCIAEVENDEMPADLPSLAADFVESKDVCKNYAEAKDVFLGMFLYEYARRHPDYSVVLLLRLAKTYETTLEKCCAAADPHECYAKVFDEFKPLVEEPQNLIKQNCELFEQLGEYKFQNALLVRYTKKVPQVSTPTLVEVSRNLGKVGSKCCKHPEAKRMPCAEDYLSVVLNQLCVLHEKTPVSDRVTKCCTESLVNRRPCFSALEVDETYVPKEFNAETFTFHADICTLSEKERQIKKQTALVELVKHKPKATKEQLKAVMDDFAAFVEKCCKADDKETCFAEEGKKLVAASQAALGL

SEQ ID NO: 301 - protein, 1010 aa, Artificial Sequence; identical to SEQ ID NO: 93
  hCPN1 variant

SEQ ID NO: 302 - protein, 995 aa, Artificial Sequence
  hCPN1 variant
VTFRHHRYDDLVRTLYKVQNECPGITRVYSIGRSVEGRHLYVLEFSDHPGIHEPLEPEVKYVGNMHGNEVLGRELMLQLSEFLCEEFRNRNQRIVQLIQDTRIHILPSMNPDGYEVAAAQGPNKSGYLVGRNNANGVDLNRNFPDLNTYIYYNEKYGGPNHHLPLPDNWKSQVEPETRAVIRWMHSFNFVLSANLHGGAVVANYPYDKSFEHRVRGVRRTASTPTPDDKLFQKLAKVYSYAHGWMFQGWNCGDYFPDGITNGASWYSLSKGMQDFNYLHTNCFEITLELSCDKFPPEEELQREWLGNREALIQFLEQVHQGIKGMVLDENYNNLANAVISVSGINHDVTSGDHGDYFRLLLPGIYTVSATAPGYDPETVTVTVGPAEPTLVNFHLKRSGSSGGSSGGSSGDAHKSEVAHRFKDLGEENFKALVLIAFAQYLQQCPFEDHVKLVNEVTEFAKTCVADESAENCDKSLHTLFGDKLCTVATLRETYGEMADCCAKQEPERNECFLQHKDDNPNLPRLVRPEVDVMCTAFHDNEETFLKKYLYEIARRHPYFYAPELLFFAKRYKAAFTECCQAADKAACLLPKLDELRDEGKASSAKQRLKCASLQKFGERAFKAWAVARLSQRFPKAEFAEVSKLVTDLTKVHTECCHGDLLECADDRADLAKYICENQDSISSKLKECCEKPLLEKSHCIAEVENDEMPADLPSLAADFVESKDVCKNYAEAKDVFLGMFLYEYARRHPDYSVVLLLRLAKTYETTLEKCCAAADPHECYAKVFDEFKPLVEEPQNLIKQNCELFEQLGEYKFQNALLVRYTKKVPQVSTPTLVEVSRNLGKVGSKCCKHPEAKRMPCAEDYLSVVLNQLCVLHEKTPVSDRVTKCCTESLVNRRPCFSALEVDETYVPKEFNAETFTFHADICTLSEKERQIKKQTALVELVKHKPKATKEQLKAVMDDFAAFVEKCCKADDKETCFAEEGKKLVAASQAALGL

SEQ ID NO: 303 - protein, 995 aa, Artificial Sequence; identical to SEQ ID NO: 238
  hCPN1 variant

SEQ ID NO: 304 - protein, 995 aa, Artificial Sequence
  hCPN1 variant
VTFRHHRYDDLVRTLYKVQNECPGITRVYSIGRSVEGRHLYVLEFSDHPGIHEPLEPEVKYVGNMHGNEVLGRELMLQLSEFLCEEFRNRNQRIVQLIQDTRIHILPSMNPDGYEVAAAQGPNKNGYLVGRNNANGVDLNRNFPDLNTYIYYNEKYGGPNHHLPLPDNWKSQVEPETRAVIRWMHSFNFVLSANLHGGAVVANYPYDKSFEHRVRGVRRTASTPTPDDKLFQKLAKVYSYAHGWMFQGWNCGDYFPDGITNGASWYSLSKGMQDFNYLHTNCFEITLELSCDKFPPEEELQREWLGNREALIQFLEQVHQGIKGMVLDENYNNLANAVISVSGINHDVTSGDHGDYFRLLLPGIYTVSATAPGYDPETVTVTVGPAEPTLVNFHLKRSGSSGGSSGGSSGDAHKSEVAHRFKDLGEENFKALVLIAFAQYLQQCPFEDHVKLVNEVTEFAKTCVADESAENCDKSLHTLFGDKLCTVATLRETYGEMADCCAKQEPERNECFLQHKDDNPNLPRLVRPEVDVMCTAFHDNEETFLKKYLYEIARRHPYFYAPELLFFAKRYKAAFTECCQAADKAACLLPKLDELRDEGKASSAKQRLKCASLQKFGERAFKAWAVARLSQRFPKAEFAEVSKLVTDLTKVHTECCHGDLLECADDRADLAKYICENQDSISSKLKECCEKPLLEKSHCIAEVENDEMPADLPSLAADFVESKDVCKNYAEAKDVFLGMFLYEYARRHPDYSVVLLLRLAKTYETTLEKCCAAADPHECYAKVFDEFKPLVEEPQNLIKQNCELFEQLGEYKFQNALLVRYTKKVPQVSTPTLVEVSRNLGKVGSKCCKHPEAKRMPCAEDYLSVVLNQLCVLHEKTPVSDRVTKCCTESLVNRRPCFSALEVDETYVPKEFNAETFTFHADICTLSEKERQIKKQTALVELVKHKPKATKEQLKAVMDDFAAFVEKCCKADDKETCFAEEGKKLVAASQAALGL

SEQ ID NO: 305 - protein, 995 aa, Artificial Sequence
  hCPN1 variant
VTFRHHRYDDLVRTLYKVQNECPGITRVYSIGRSVEGRHLYVLEFSDHPGIHEPLEPEVKYVGNMHGNEVLGRELMLQLSEFLCEEFRNRNQRIVQLIQDTRIHILPSMNPDGYEVAAAQGPNKIGYLVGRNNANGVDLNRNFPDLNTYIYYNEKYGGPNHHLPLPDNWKSQVEPETRAVIRWMHSFNFVLSANLHGGAVVANYPYDKSFEHRVRGVRRTASTPTPDDKLFQKLAKVYSYAHGWMFQGWNCGDYFPDGITNGASWYSLSKGMQDFNYLHTNCFEITLELSCDKFPPEEELQREWLGNREALIQFLEQVHQGIKGMVLDENYNNLANAVISVSGINHDVTSGDHGDYFRLLLPGIYTVSATAPGYDPETVTVTVGPAEPTLVNFHLKRSGSSGGSSGGSSGDAHKSEVAHRFKDLGEENFKALVLIAFAQYLQQCPFEDHVKLVNEVTEFAKTCVADESAENCDKSLHTLFGDKLCTVATLRETYGEMADCCAKQEPERNECFLQHKDDNPNLPRLVRPEVDVMCTAFHDNEETFLKKYLYEIARRHPYFYAPELLFFAKRYKAAFTECCQAADKAACLLPKLDELRDEGKASSAKQRLKCASLQKFGERAFKAWAVARLSQRFPKAEFAEVSKLVTDLTKVHTECCHGDLLECADDRADLAKYICENQDSISSKLKECCEKPLLEKSHCIAEVENDEMPADLPSLAADFVESKDVCKNYAEAKDVFLGMFLYEYARRHPDYSVVLLLRLAKTYETTLEKCCAAADPHECYAKVFDEFKPLVEEPQNLIKQNCELFEQLGEYKFQNALLVRYTKKVPQVSTPTLVEVSRNLGKVGSKCCKHPEAKRMPCAEDYLSVVLNQLCVLHEKTPVSDRVTKCCTESLVNRRPCFSALEVDETYVPKEFNAETFTFHADICTLSEKERQIKKQTALVELVKHKPKATKEQLKAVMDDFAAFVEKCCKADDKETCFAEEGKKLVAASQAALGL

SEQ ID NO: 306 - protein, 995 aa, Artificial Sequence
  hCPN1 variant
VTFRHHRYDDLVRTLYKVQNECPGITRVYSIGRSVEGRHLYVLEFSDHPGIHEPLEPEVKYVGNMHGNEVLGRELMLQLSEFLCEEFRNRNQRIVQLIQDTRIHILPSMNPDGYEVAAAQGPNKFGYLVGRNNANGVDLNRNFPDLNTYIYYNEKYGGPNHHLPLPDNWKSQVEPETRAVIRWMHSFNFVLSANLHGGAVVANYPYDKSFEHRVRGVRRTASTPTPDDKLFQKLAKVYSYAHGWMFQGWNCGDYFPDGITNGASWYSLSKGMQDFNYLHTNCFEITLELSCDKFPPEEELQREWLGNREALIQFLEQVHQGIKGMVLDENYNNLANAVISVSGINHDVTSGDHGDYFRLLLPGIYTVSATAPGYDPETVTVTVGPAEPTLVNFHLKRSGSSGGSSGGSSGDAHKSEVAHRFKDLGEENFKALVLIAFAQYLQQCPFEDHVKLVNEVTEFAKTCVADESAENCDKSLHTLFGDKLCTVATLRETYGEMADCCAKQEPERNECFLQHKDDNPNLPRLVRPEVDVMCTAFHDNEETFLKKYLYEIARRHPYFYAPELLFFAKRYKAAFTECCQAADKAACLLPKLDELRDEGKASSAKQRLKCASLQKFGERAFKAWAVARLSQRFPKAEFAEVSKLVTDLTKVHTECCHGDLLECADDRADLAKYICENQDSISSKLKECCEKPLLEKSHCIAEVENDEMPADLPSLAADFVESKDVCKNYAEAKDVFLGMFLYEYARRHPDYSVVLLLRLAKTYETTLEKCCAAADPHECYAKVFDEFKPLVEEPQNLIKQNCELFEQLGEYKFQNALLVRYTKKVPQVSTPTLVEVSRNLGKVGSKCCKHPEAKRMPCAEDYLSVVLNQLCVLHEKTPVSDRVTKCCTESLVNRRPCFSALEVDETYVPKEFNAETFTFHADICTLSEKERQIKKQTALVELVKHKPKATKEQLKAVMDDFAAFVEKCCKADDKETCFAEEGKKLVAASQAALGL

SEQ ID NO: 307 - protein, 995 aa, Artificial Sequence
  hCPN1 variant
VTFRHHRYDDLVRTLYKVQNECPGITRVYSIGRSVEGRHLYVLEFSDHPGIHEPLEPEVKYVGNMHGDEVLGRELMLQLSEFLCEEFRNRNQRIVQLIQDTRIHILPSMNPDGYEVAAAQGPNKPGYLVGRNNANGVDLNRNFPDLNTYIYYNEKYGGPNHHLPLPDNWKSQVEPETRAVIRWMHSFNFVLSANLHGGAVVANYPYDKSFEHRVRGVRRTASTPTPDDKLFQKLAKVYSYAHGWMFQGWNCGDYFPDGITNGASWYSLSKGMQDFNYLHTNCFEITLELSCDKFPPEEELQREWLGNREALIQFLEQVHQGIKGMVLDENYNNLANAVISVSGINHDVTSGDHGDYFRLLLPGIYTVSATAPGYDPETVTVTVGPAEPTLVNFHLKRSGSSGGSSGGSSGDAHKSEVAHRFKDLGEENFKALVLIAFAQYLQQCPFEDHVKLVNEVTEFAKTCVADESAENCDKSLHTLFGDKLCTVATLRETYGEMADCCAKQEPERNECFLQHKDDNPNLPRLVRPEVDVMCTAFHDNEETFLKKYLYEIARRHPYFYAPELLFFAKRYKAAFTECCQAADKAACLLPKLDELRDEGKASSAKQRLKCASLQKFGERAFKAWAVARLSQRFPKAEFAEVSKLVTDLTKVHTECCHGDLLECADDRADLAKYICENQDSISSKLKECCEKPLLEKSHCIAEVENDEMPADLPSLAADFVESKDVCKNYAEAKDVFLGMFLYEYARRHPDYSVVLLLRLAKTYETTLEKCCAAADPHECYAKVFDEFKPLVEEPQNLIKQNCELFEQLGEYKFQNALLVRYTKKVPQVSTPTLVEVSRNLGKVGSKCCKHPEAKRMPCAEDYLSVVLNQLCVLHEKTPVSDRVTKCCTESLVNRRPCFSALEVDETYVPKEFNAETFTFHADICTLSEKERQIKKQTALVELVKHKPKATKEQLKAVMDDFAAFVEKCCKADDKETCFAEEGKKLVAASQAALGL

SEQ ID NO: 308 - protein, 995 aa, Artificial Sequence
  hCPN1 variant
VTFRHHRYDDLVRTLYKVQNECPGITRVYSIGRSVEGRHLYVLEFSDHPGIHEPLEPEVKYVGNMHGDEVLGRELMLQLSEFLCEEFRNRNQRIVQLIQDTRIHILPSMNPDGYEVAAAQGPNKYGYLVGRNNANGVDLNRNFPDLNTYIYYNEKYGGPNHHLPLPDNWKSQVEPETRAVIRWMHSFNFVLSANLHGGAVVANYPYDKSFEHRVRGVRRTASTPTPDDKLFQKLAKVYSYAHGWMFQGWNCGDYFPDGITNGASWYSLSKGMQDFNYLHTNCFEITLELSCDKFPPEEELQREWLGNREALIQFLEQVHQGIKGMVLDENYNNLANAVISVSGINHDVTSGDHGDYFRLLLPGIYTVSATAPGYDPETVTVTVGPAEPTLVNFHLKRSGSSGGSSGGSSGDAHKSEVAHRFKDLGEENFKALVLIAFAQYLQQCPFEDHVKLVNEVTEFAKTCVADESAENCDKSLHTLFGDKLCTVATLRETYGEMADCCAKQEPERNECFLQHKDDNPNLPRLVRPEVDVMCTAFHDNEETFLKKYLYEIARRHPYFYAPELLFFAKRYKAAFTECCQAADKAACLLPKLDELRDEGKASSAKQRLKCASLQKFGERAFKAWAVARLSQRFPKAEFAEVSKLVTDLTKVHTECCHGDLLECADDRADLAKYICENQDSISSKLKECCEKPLLEKSHCIAEVENDEMPADLPSLAADFVESKDVCKNYAEAKDVFLGMFLYEYARRHPDYSVVLLLRLAKTYETTLEKCCAAADPHECYAKVFDEFKPLVEEPQNLIKQNCELFEQLGEYKFQNALLVRYTKKVPQVSTPTLVEVSRNLGKVGSKCCKHPEAKRMPCAEDYLSVVLNQLCVLHEKTPVSDRVTKCCTESLVNRRPCFSALEVDETYVPKEFNAETFTFHADICTLSEKERQIKKQTALVELVKHKPKATKEQLKAVMDDFAAFVEKCCKADDKETCFAEEGKKLVAASQAALGL

SEQ ID NO: 309 - protein, 995 aa, Artificial Sequence
  hCPN1 variant
VTFRHHRYDDLVRTLYKVQNECPGITRVYSIGRSVEGRHLYVLEFSDHPGIHEPLEPEVKYVGNMHGDEALGRELMLQLSEFLCEEFRNRNQRIVQLIQDTRIHILPSMNPDGYEVAAAQGPNKYGYLVGRNNANGVDLNRNFPDLNTYIYYNEKYGGPNHHLPLPDNWKSQVEPETRAVIRWMHSFNFVLSANLHGGAVVANYPYDKSFEHRVRGVRRTASTPTPDDKLFQKLAKVYSYAHGWMFQGWNCGDYFPDGITNGASWYSLSKGMQDFNYLHTNCFEITLELSCDKFPPEEELQREWLGNREALIQFLEQVHQGIKGMVLDENYNNLANAVISVSGINHDVTSGDHGDYFRLLLPGIYTVSATAPGYDPETVTVTVGPAEPTLVNFHLKRSGSSGGSSGGSSGDAHKSEVAHRFKDLGEENFKALVLIAFAQYLQQCPFEDHVKLVNEVTEFAKTCVADESAENCDKSLHTLFGDKLCTVATLRETYGEMADCCAKQEPERNECFLQHKDDNPNLPRLVRPEVDVMCTAFHDNEETFLKKYLYEIARRHPYFYAPELLFFAKRYKAAFTECCQAADKAACLLPKLDELRDEGKASSAKQRLKCASLQKFGERAFKAWAVARLSQRFPKAEFAEVSKLVTDLTKVHTECCHGDLLECADDRADLAKYICENQDSISSKLKECCEKPLLEKSHCIAEVENDEMPADLPSLAADFVESKDVCKNYAEAKDVFLGMFLYEYARRHPDYSVVLLLRLAKTYETTLEKCCAAADPHECYAKVFDEFKPLVEEPQNLIKQNCELFEQLGEYKFQNALLVRYTKKVPQVSTPTLVEVSRNLGKVGSKCCKHPEAKRMPCAEDYLSVVLNQLCVLHEKTPVSDRVTKCCTESLVNRRPCFSALEVDETYVPKEFNAETFTFHADICTLSEKERQIKKQTALVELVKHKPKATKEQLKAVMDDFAAFVEKCCKADDKETCFAEEGKKLVAASQAALGL

SEQ ID NO: 310 - protein, 995 aa, Artificial Sequence
  hCPN1 variant
VTFRHHRYDDLVRTLYKVQNECPGITRVYSIGRSVEGRHLYVLEFSDHPGIHEPLEPEVKYVGNMHGNEALGRELMLQLSEFLCEEFRNRNQRIVQLIQDTRIHILPSMNPDGYEVAAAQGPDSNGYLTGRNNANGVDLNRNFPDLNTYIYYNEKYGGPNHHLPLPDNWKSQVEPETRAVIRWMHSFNFVLSANLHGGAVVANYPYDKSFEHRVRGVRRTASTPTPDDKLFQKLAKVYSYAHGWMFQGWNCGDYFPDGITNGASWYSLSKGMQDFNYLHTNCFEITLELSCDKFPPEEELQREWLGNREALIQFLEQVHQGIKGMVLDENYNNLANAVISVSGINHDVTSGDHGDYFRLLLPGIYTVSATAPGYDPETVTVTVGPAEPTLVNFHLKRSGSSGGSSGGSSGDAHKSEVAHRFKDLGEENFKALVLIAFAQYLQQCPFEDHVKLVNEVTEFAKTCVADESAENCDKSLHTLFGDKLCTVATLRETYGEMADCCAKQEPERNECFLQHKDDNPNLPRLVRPEVDVMCTAFHDNEETFLKKYLYEIARRHPYFYAPELLFFAKRYKAAFTECCQAADKAACLLPKLDELRDEGKASSAKQRLKCASLQKFGERAFKAWAVARLSQRFPKAEFAEVSKLVTDLTKVHTECCHGDLLECADDRADLAKYICENQDSISSKLKECCEKPLLEKSHCIAEVENDEMPADLPSLAADFVESKDVCKNYAEAKDVFLGMFLYEYARRHPDYSVVLLLRLAKTYETTLEKCCAAADPHECYAKVFDEFKPLVEEPQNLIKQNCELFEQLGEYKFQNALLVRYTKKVPQVSTPTLVEVSRNLGKVGSKCCKHPEAKRMPCAEDYLSVVLNQLCVLHEKTPVSDRVTKCCTESLVNRRPCFSALEVDETYVPKEFNAETFTFHADICTLSEKERQIKKQTALVELVKHKPKATKEQLKAVMDDFAAFVEKCCKADDKETCFAEEGKKLVAASQAALGL

SEQ ID NO: 311 - protein, 995 aa, Artificial Sequence
  hCPN1 variant
VTFRHHRYDDLVRTLYKVQNECPGITRVYSIGRSVEGRHLYVLEFSDHPGIHEPLEPEVKYVGNMHGNEALGRELMLQLSEFLCEEFRNRNQRIVQLIQDTRIHILPSMNPDGYEVAAAQGPNTSGYLVGRNNANGVDLNRNFPDLNTYIYYNEKYGGPNHHLPLPDNWKSQVEPETRAVIRWMHSFNFVLSANLHGGAVVANYPYDKSFEHRVRGVRRTASTPTPDDKLFQKLAKVYSYAHGWMFQGWNCGDYFPDGITNGASWYSLSKGMQDFNYLHTNCFEITLELSCDKFPPEEELQREWLGNREALIQFLEQVHQGIKGMVLDENYNNLANAVISVSGINHDVTSGDHGDYFRLLLPGIYTVSATAPGYDPETVTVTVGPAEPTLVNFHLKRSGSSGGSSGGSSGDAHKSEVAHRFKDLGEENFKALVLIAFAQYLQQCPFEDHVKLVNEVTEFAKTCVADESAENCDKSLHTLFGDKLCTVATLRETYGEMADCCAKQEPERNECFLQHKDDNPNLPRLVRPEVDVMCTAFHDNEETFLKKYLYEIARRHPYFYAPELLFFAKRYKAAFTECCQAADKAACLLPKLDELRDEGKASSAKQRLKCASLQKFGERAFKAWAVARLSQRFPKAEFAEVSKLVTDLTKVHTECCHGDLLECADDRADLAKYICENQDSISSKLKECCEKPLLEKSHCIAEVENDEMPADLPSLAADFVESKDVCKNYAEAKDVFLGMFLYEYARRHPDYSVVLLLRLAKTYETTLEKCCAAADPHECYAKVFDEFKPLVEEPQNLIKQNCELFEQLGEYKFQNALLVRYTKKVPQVSTPTLVEVSRNLGKVGSKCCKHPEAKRMPCAEDYLSVVLNQLCVLHEKTPVSDRVTKCCTESLVNRRPCFSALEVDETYVPKEFNAETFTFHADICTLSEKERQIKKQTALVELVKHKPKATKEQLKAVMDDFAAFVEKCCKADDKETCFAEEGKKLVAASQAALGL

SEQ ID NO: 312 - protein, 995 aa, Artificial Sequence
  hCPN1 variant
VTFRHHRYDDLVRTLYKVQNECPGITRVYSIGRSVEGRHLYVLEFSDHPGIHEPLEPEVKYVGNMHGNEALGRELMLQLSEFLCEEFRNRNQRIVQLIQDTRIHILPSMNPDGYEVAAAQDRDISGYLVGRNNANGVDLNRNFPDLNTYIYYNEKYGGPNHHLPLPDNWKSQVEPETRAVIRWMHSFNFVLSANLHGGAVVANYPYDKSFEHRVRGVRRTASTPTPDDKLFQKLAKVYSYAHGWMFQGWNCGDYFPDGITNGASWYSLSKGMQDFNYLHTNCFEITLELSCDKFPPEEELQREWLGNREALIQFLEQVHQGIKGMVLDENYNNLANAVISVSGINHDVTSGDHGDYFRLLLPGIYTVSATAPGYDPETVTVTVGPAEPTLVNFHLKRSGSSGGSSGGSSGDAHKSEVAHRFKDLGEENFKALVLIAFAQYLQQCPFEDHVKLVNEVTEFAKTCVADESAENCDKSLHTLFGDKLCTVATLRETYGEMADCCAKQEPERNECFLQHKDDNPNLPRLVRPEVDVMCTAFHDNEETFLKKYLYEIARRHPYFYAPELLFFAKRYKAAFTECCQAADKAACLLPKLDELRDEGKASSAKQRLKCASLQKFGERAFKAWAVARLSQRFPKAEFAEVSKLVTDLTKVHTECCHGDLLECADDRADLAKYICENQDSISSKLKECCEKPLLEKSHCIAEVENDEMPADLPSLAADFVESKDVCKNYAEAKDVFLGMFLYEYARRHPDYSVVLLLRLAKTYETTLEKCCAAADPHECYAKVFDEFKPLVEEPQNLIKQNCELFEQLGEYKFQNALLVRYTKKVPQVSTPTLVEVSRNLGKVGSKCCKHPEAKRMPCAEDYLSVVLNQLCVLHEKTPVSDRVTKCCTESLVNRRPCFSALEVDETYVPKEFNAETFTFHADICTLSEKERQIKKQTALVELVKHKPKATKEQLKAVMDDFAAFVEKCCKADDKETCFAEEGKKLVAASQAALGL

SEQ ID NO: 313 - protein, 995 aa, Artificial Sequence
  hCPN1 variant
VTFRHHRYDDLVRTLYKVQNECPGITRVYSIGRSVEGRHLYVLEFSDHPGIHEPLEPEVKYVGNMHGNEALGRELMLQLSEFLCEEFRNRNQRIVQLIQDTRIHILPSMNPDGYEVAAAQGPDISGYLVGRNNANGVDLNRNFPDLNTYIYYNEKYGGPNHHLPLPDNWKSQVEPETRAVIRWMHSFNFVLSANLHGGAVVANYPYDKSFEHRVRGVRRTASTPTPDDKLFQKLAKVYSYAHGWMFQGWNCGDYFPDGITNGASWYSLSKGMQDFNYLHTNCFEITLELSCDKFPPEEELQREWLGNREALIQFLEQVHQGIKGMVLDENYNNLANAVISVSGINHDVTSGDHGDYFRLLLPGIYTVSATAPGYDPETVTVTVGPAEPTLVNFHLKRSGSSGGSSGGSSGDAHKSEVAHRFKDLGEENFKALVLIAFAQYLQQCPFEDHVKLVNEVTEFAKTCVADESAENCDKSLHTLFGDKLCTVATLRETYGEMADCCAKQEPERNECFLQHKDDNPNLPRLVRPEVDVMCTAFHDNEETFLKKYLYEIARRHPYFYAPELLFFAKRYKAAFTECCQAADKAACLLPKLDELRDEGKASSAKQRLKCASLQKFGERAFKAWAVARLSQRFPKAEFAEVSKLVTDLTKVHTECCHGDLLECADDRADLAKYICENQDSISSKLKECCEKPLLEKSHCIAEVENDEMPADLPSLAADFVESKDVCKNYAEAKDVFLGMFLYEYARRHPDYSVVLLLRLAKTYETTLEKCCAAADPHECYAKVFDEFKPLVEEPQNLIKQNCELFEQLGEYKFQNALLVRYTKKVPQVSTPTLVEVSRNLGKVGSKCCKHPEAKRMPCAEDYLSVVLNQLCVLHEKTPVSDRVTKCCTESLVNRRPCFSALEVDETYVPKEFNAETFTFHADICTLSEKERQIKKQTALVELVKHKPKATKEQLKAVMDDFAAFVEKCCKADDKETCFAEEGKKLVAASQAALGL

SEQ ID NO: 314 - protein, 995 aa, Artificial Sequence
  hCPN1 variant
VTFRHHRYDDLVRTLYKVQNECPGITRVYSIGRSVEGRHLYVLEFSDHPGIHEPLEPEVKYVGNMHGNEALGRELMLQLSEFLCEEFRNRNQRIVQLIQDTRIHILPSMNPDGYEVAAAQGPDSIGYLTGRNNANGVDLNRNFPDLNTYIYYNEKYGGPNHHLPLPDNWKSQVEPETRAVIRWMHSFNFVLSANLHGGAVVANYPYDKSFEHRVRGVRRTASTPTPDDKLFQKLAKVYSYAHGWMFQGWNCGDYFPDGITNGASWYSLSKGMQDFNYLHTNCFEITLELSCDKFPPEEELQREWLGNREALIQFLEQVHQGIKGMVLDENYNNLANAVISVSGINHDVTSGDHGDYFRLLLPGIYTVSATAPGYDPETVTVTVGPAEPTLVNFHLKRSGSSGGSSGGSSGDAHKSEVAHRFKDLGEENFKALVLIAFAQYLQQCPFEDHVKLVNEVTEFAKTCVADESAENCDKSLHTLFGDKLCTVATLRETYGEMADCCAKQEPERNECFLQHKDDNPNLPRLVRPEVDVMCTAFHDNEETFLKKYLYEIARRHPYFYAPELLFFAKRYKAAFTECCQAADKAACLLPKLDELRDEGKASSAKQRLKCASLQKFGERAFKAWAVARLSQRFPKAEFAEVSKLVTDLTKVHTECCHGDLLECADDRADLAKYICENQDSISSKLKECCEKPLLEKSHCIAEVENDEMPADLPSLAADFVESKDVCKNYAEAKDVFLGMFLYEYARRHPDYSVVLLLRLAKTYETTLEKCCAAADPHECYAKVFDEFKPLVEEPQNLIKQNCELFEQLGEYKFQNALLVRYTKKVPQVSTPTLVEVSRNLGKVGSKCCKHPEAKRMPCAEDYLSVVLNQLCVLHEKTPVSDRVTKCCTESLVNRRPCFSALEVDETYVPKEFNAETFTFHADICTLSEKERQIKKQTALVELVKHKPKATKEQLKAVMDDFAAFVEKCCKADDKETCFAEEGKKLVAASQAALGL

SEQ ID NO: 315 - protein, 995 aa, Artificial Sequence
  hCPN1 variant
VTFRHHRYDDLVRTLYKVQNECPGITRVYSIGRSVEGRHLYVLEFSDHPGIHEPLEPEVKYVGNMHGNEALGRELMLQLSEFLCEEFRNRNQRIVQLIQDTRIHILPSMNPDGYEVAAAQGPDASGYLVGRNNANGVDLNRNFPDLNTYIYYNEKYGGPNHHLPLPDNWKSQVEPETRAVIRWMHSFNFVLSANLHGGAVVANYPYDKSFEHRVRGVRRTASTPTPDDKLFQKLAKVYSYAHGWMFQGWNCGDYFPDGITNGASWYSLSKGMQDFNYLHTNCFEITLELSCDKFPPEEELQREWLGNREALIQFLEQVHQGIKGMVLDENYNNLANAVISVSGINHDVTSGDHGDYFRLLLPGIYTVSATAPGYDPETVTVTVGPAEPTLVNFHLKRSGSSGGSSGGSSGDAHKSEVAHRFKDLGEENFKALVLIAFAQYLQQCPFEDHVKLVNEVTEFAKTCVADESAENCDKSLHTLFGDKLCTVATLRETYGEMADCCAKQEPERNECFLQHKDDNPNLPRLVRPEVDVMCTAFHDNEETFLKKYLYEIARRHPYFYAPELLFFAKRYKAAFTECCQAADKAACLLPKLDELRDEGKASSAKQRLKCASLQKFGERAFKAWAVARLSQRFPKAEFAEVSKLVTDLTKVHTECCHGDLLECADDRADLAKYICENQDSISSKLKECCEKPLLEKSHCIAEVENDEMPADLPSLAADFVESKDVCKNYAEAKDVFLGMFLYEYARRHPDYSVVLLLRLAKTYETTLEKCCAAADPHECYAKVFDEFKPLVEEPQNLIKQNCELFEQLGEYKFQNALLVRYTKKVPQVSTPTLVEVSRNLGKVGSKCCKHPEAKRMPCAEDYLSVVLNQLCVLHEKTPVSDRVTKCCTESLVNRRPCFSALEVDETYVPKEFNAETFTFHADICTLSEKERQIKKQTALVELVKHKPKATKEQLKAVMDDFAAFVEKCCKADDKETCFAEEGKKLVAASQAALGL

SEQ ID NO: 316 - protein, 995 aa, Artificial Sequence
  hCPN1 variant
VTFRHHRYDDLVRTLYKVQNECPGITRVYSIGRSVEGRHLYVLEFSDHPGIHEPLEPEVKYVGNMHGNEALGRELMLQLSEFLCEEFRNRNQRIVQLIQDTRIHILPSMNPDGYEVAAAQGPNASGYLVGRNNANGVDLNRNFPDLNTYIYYNEKYGGPNHHLPLPDNWKSQVEPETRAVIRWMHSFNFVLSANLHGGAVVANYPYDKSFEHRVRGVRRTASTPTPDDKLFQKLAKVYSYAHGWMFQGWNCGDYFPDGITNGASWYSLSKGMQDFNYLHTNCFEITLELSCDKFPPEEELQREWLGNREALIQFLEQVHQGIKGMVLDENYNNLANAVISVSGINHDVTSGDHGDYFRLLLPGIYTVSATAPGYDPETVTVTVGPAEPTLVNFHLKRSGSSGGSSGGSSGDAHKSEVAHRFKDLGEENFKALVLIAFAQYLQQCPFEDHVKLVNEVTEFAKTCVADESAENCDKSLHTLFGDKLCTVATLRETYGEMADCCAKQEPERNECFLQHKDDNPNLPRLVRPEVDVMCTAFHDNEETFLKKYLYEIARRHPYFYAPELLFFAKRYKAAFTECCQAADKAACLLPKLDELRDEGKASSAKQRLKCASLQKFGERAFKAWAVARLSQRFPKAEFAEVSKLVTDLTKVHTECCHGDLLECADDRADLAKYICENQDSISSKLKECCEKPLLEKSHCIAEVENDEMPADLPSLAADFVESKDVCKNYAEAKDVFLGMFLYEYARRHPDYSVVLLLRLAKTYETTLEKCCAAADPHECYAKVFDEFKPLVEEPQNLIKQNCELFEQLGEYKFQNALLVRYTKKVPQVSTPTLVEVSRNLGKVGSKCCKHPEAKRMPCAEDYLSVVLNQLCVLHEKTPVSDRVTKCCTESLVNRRPCFSALEVDETYVPKEFNAETFTFHADICTLSEKERQIKKQTALVELVKHKPKATKEQLKAVMDDFAAFVEKCCKADDKETCFAEEGKKLVAASQAALGL

SEQ ID NO: 317 - protein, 995 aa, Artificial Sequence
  hCPN1 variant
VTFRHHRYDDLVRTLYKVQNECPGITRVYSIGRSVEGRHLYVLEFSDHPGIHEPLEPEVKYVGNMHGNEALGRELMLQLSEFLCEEFRNRNQRIVQLIQDTRIHILPSMNPDGYEVAAAQGPDANGYLTGRNNANGVDLNRNFPDLNTYIYYNEKYGGPNHHLPLPDNWKSQVEPETRAVIRWMHSFNFVLSANLHGGAVVANYPYDKSFEHRVRGVRRTASTPTPDDKLFQKLAKVYSYAHGWMFQGWNCGDYFPDGITNGASWYSLSKGMQDFNYLHTNCFEITLELSCDKFPPEEELQREWLGNREALIQFLEQVHQGIKGMVLDENYNNLANAVISVSGINHDVTSGDHGDYFRLLLPGIYTVSATAPGYDPETVTVTVGPAEPTLVNFHLKRSGSSGGSSGGSSGDAHKSEVAHRFKDLGEENFKALVLIAFAQYLQQCPFEDHVKLVNEVTEFAKTCVADESAENCDKSLHTLFGDKLCTVATLRETYGEMADCCAKQEPERNECFLQHKDDNPNLPRLVRPEVDVMCTAFHDNEETFLKKYLYEIARRHPYFYAPELLFFAKRYKAAFTECCQAADKAACLLPKLDELRDEGKASSAKQRLKCASLQKFGERAFKAWAVARLSQRFPKAEFAEVSKLVTDLTKVHTECCHGDLLECADDRADLAKYICENQDSISSKLKECCEKPLLEKSHCIAEVENDEMPADLPSLAADFVESKDVCKNYAEAKDVFLGMFLYEYARRHPDYSVVLLLRLAKTYETTLEKCCAAADPHECYAKVFDEFKPLVEEPQNLIKQNCELFEQLGEYKFQNALLVRYTKKVPQVSTPTLVEVSRNLGKVGSKCCKHPEAKRMPCAEDYLSVVLNQLCVLHEKTPVSDRVTKCCTESLVNRRPCFSALEVDETYVPKEFNAETFTFHADICTLSEKERQIKKQTALVELVKHKPKATKEQLKAVMDDFAAFVEKCCKADDKETCFAEEGKKLVAASQAALGL

SEQ ID NO: 318 - protein, 995 aa, Artificial Sequence
  hCPN1 variant
VTFRHHRYDDLVRTLYKVQNECPGITRVYSIGRSVEGRHLYVLEFSDHPGIHEPLEPEVKYVGNMHGNEALGRELMLQLSEFLCEEFRNRNQRIVQLIQDTRIHILPSMNPDGYEVAAAQERDVSGYLVGRNNANGVDLNRNFPDLNTYIYYNEKYGGPNHHLPLPDNWKSQVEPETRAVIRWMHSFNFVLSANLHGGAVVANYPYDKSFEHRVRGVRRTASTPTPDDKLFQKLAKVYSYAHGWMFQGWNCGDYFPDGITNGASWYSLSKGMQDFNYLHTNCFEITLELSCDKFPPEEELQREWLGNREALIQFLEQVHQGIKGMVLDENYNNLANAVISVSGINHDVTSGDHGDYFRLLLPGIYTVSATAPGYDPETVTVTVGPAEPTLVNFHLKRSGSSGGSSGGSSGDAHKSEVAHRFKDLGEENFKALVLIAFAQYLQQCPFEDHVKLVNEVTEFAKTCVADESAENCDKSLHTLFGDKLCTVATLRETYGEMADCCAKQEPERNECFLQHKDDNPNLPRLVRPEVDVMCTAFHDNEETFLKKYLYEIARRHPYFYAPELLFFAKRYKAAFTECCQAADKAACLLPKLDELRDEGKASSAKQRLKCASLQKFGERAFKAWAVARLSQRFPKAEFAEVSKLVTDLTKVHTECCHGDLLECADDRADLAKYICENQDSISSKLKECCEKPLLEKSHCIAEVENDEMPADLPSLAADFVESKDVCKNYAEAKDVFLGMFLYEYARRHPDYSVVLLLRLAKTYETTLEKCCAAADPHECYAKVFDEFKPLVEEPQNLIKQNCELFEQLGEYKFQNALLVRYTKKVPQVSTPTLVEVSRNLGKVGSKCCKHPEAKRMPCAEDYLSVVLNQLCVLHEKTPVSDRVTKCCTESLVNRRPCFSALEVDETYVPKEFNAETFTFHADICTLSEKERQIKKQTALVELVKHKPKATKEQLKAVMDDFAAFVEKCCKADDKETCFAEEGKKLVAASQAALGL

SEQ ID NO: 319 - protein, 995 aa, Artificial Sequence
  hCPN1 variant
VTFRHHRYDDLVRTLYKVQNECPGITRVYSIGRSVEGRHLYVLEFSDHPGIHEPLEPEVKYVGNMHGNEALGRELMLQLSEFLCEEFRNRNQRIVQLIQDTRIHILPSMNPDGYEVAAAQGPSTSGYLVGRNNANGVDLNRNFPDLNTYIYYNEKYGGPNHHLPLPDNWKSQVEPETRAVIRWMHSFNFVLSANLHGGAVVANYPYDKSFEHRVRGVRRTASTPTPDDKLFQKLAKVYSYAHGWMFQGWNCGDYFPDGITNGASWYSLSKGMQDFNYLHTNCFEITLELSCDKFPPEEELQREWLGNREALIQFLEQVHQGIKGMVLDENYNNLANAVISVSGINHDVTSGDHGDYFRLLLPGIYTVSATAPGYDPETVTVTVGPAEPTLVNFHLKRSGSSGGSSGGSSGDAHKSEVAHRFKDLGEENFKALVLIAFAQYLQQCPFEDHVKLVNEVTEFAKTCVADESAENCDKSLHTLFGDKLCTVATLRETYGEMADCCAKQEPERNECFLQHKDDNPNLPRLVRPEVDVMCTAFHDNEETFLKKYLYEIARRHPYFYAPELLFFAKRYKAAFTECCQAADKAACLLPKLDELRDEGKASSAKQRLKCASLQKFGERAFKAWAVARLSQRFPKAEFAEVSKLVTDLTKVHTECCHGDLLECADDRADLAKYICENQDSISSKLKECCEKPLLEKSHCIAEVENDEMPADLPSLAADFVESKDVCKNYAEAKDVFLGMFLYEYARRHPDYSVVLLLRLAKTYETTLEKCCAAADPHECYAKVFDEFKPLVEEPQNLIKQNCELFEQLGEYKFQNALLVRYTKKVPQVSTPTLVEVSRNLGKVGSKCCKHPEAKRMPCAEDYLSVVLNQLCVLHEKTPVSDRVTKCCTESLVNRRPCFSALEVDETYVPKEFNAETFTFHADICTLSEKERQIKKQTALVELVKHKPKATKEQLKAVMDDFAAFVEKCCKADDKETCFAEEGKKLVAASQAALGL

SEQ ID NO: 320 - protein, 995 aa, Artificial Sequence
  hCPN1 variant
VTFRHHRYDDLVRTLYKVQNECPGITRVYSIGRSVEGRHLYVLEFSDHPGIHEPLEPEVFYIGNMHGNEALGRELMLQLSEFLCEEFRNRNQRIVQLIQDTRIHILPSMNPDGYEVAAAQGPNKPGYLVGRNNANGVDLNRNFPDLNTYIYYNEKYGGPNHHLPLPDNWKSQVEPETRAIIRWLHSFNFVLAANLHGGAVVANYPYDKSFEHRVRGVRRTASTPTPDDKLFQKLAKVYSYAHGWMFQGWNCGDYFPDGITNGASWYSLSKGLQDFIYLHTNCFVITLELSCDKFPPEEELQREWLGNREALIQFLEQVHQGIKGMVLDENYNNLANAVISVSGINHDVTSGDHGDYFRLLLPGIYTVSATAPGYDPETVTVTVGPAEPTLVNFHLKRSGSSGGSSGGSSGDAHKSEVAHRFKDLGEENFKALVLIAFAQYLQQCPFEDHVKLVNEVTEFAKTCVADESAENCDKSLHTLFGDKLCTVATLRETYGEMADCCAKQEPERNECFLQHKDDNPNLPRLVRPEVDVMCTAFHDNEETFLKKYLYEIARRHPYFYAPELLFFAKRYKAAFTECCQAADKAACLLPKLDELRDEGKASSAKQRLKCASLQKFGERAFKAWAVARLSQRFPKAEFAEVSKLVTDLTKVHTECCHGDLLECADDRADLAKYICENQDSISSKLKECCEKPLLEKSHCIAEVENDEMPADLPSLAADFVESKDVCKNYAEAKDVFLGMFLYEYARRHPDYSVVLLLRLAKTYETTLEKCCAAADPHECYAKVFDEFKPLVEEPQNLIKQNCELFEQLGEYKFQNALLVRYTKKVPQVSTPTLVEVSRNLGKVGSKCCKHPEAKRMPCAEDYLSVVLNQLCVLHEKTPVSDRVTKCCTESLVNRRPCFSALEVDETYVPKEFNAETFTFHADICTLSEKERQIKKQTALVELVKHKPKATKEQLKAVMDDFAAFVEKCCKADDKETCFAEEGKKLVAASQAALGL

SEQ ID NO: 321 - protein, 995 aa, Artificial Sequence
  hCPN1 variant
VTFRHHRYDDLVRTLYKVQNECPGITRVYSIGRSVEGRHLYVLEFSDHPGIHEPLEPEVFYAGNMHGNEALGRELMLQLSEFLCEEFRNRNQRIVQLIQDTRIHILPSMNPDGYEVAAAQGPNKPGYLVGRNNANGVDLNRNFPDLNTYIYYNEKYGGPNHHLPLPDNWKSQVEPETRAFIRWLHSFNFVLAANLHGGAVVANYPYDKSFEHRVRGVRRTASTPTPDDKLFQKLAKVYSYAHGWMFQGWNCGDYFPDGITNGASWYSLSKGAQDFVYLHTNCFIITLELSCDKFPPEEELQREWLGNREALIQFLEQVHQGIKGMVLDENYNNLANAVISVSGINHDVTSGDHGDYFRLLLPGIYTVSATAPGYDPETVTVTVGPAEPTLVNFHLKRSGSSGGSSGGSSGDAHKSEVAHRFKDLGEENFKALVLIAFAQYLQQCPFEDHVKLVNEVTEFAKTCVADESAENCDKSLHTLFGDKLCTVATLRETYGEMADCCAKQEPERNECFLQHKDDNPNLPRLVRPEVDVMCTAFHDNEETFLKKYLYEIARRHPYFYAPELLFFAKRYKAAFTECCQAADKAACLLPKLDELRDEGKASSAKQRLKCASLQKFGERAFKAWAVARLSQRFPKAEFAEVSKLVTDLTKVHTECCHGDLLECADDRADLAKYICENQDSISSKLKECCEKPLLEKSHCIAEVENDEMPADLPSLAADFVESKDVCKNYAEAKDVFLGMFLYEYARRHPDYSVVLLLRLAKTYETTLEKCCAAADPHECYAKVFDEFKPLVEEPQNLIKQNCELFEQLGEYKFQNALLVRYTKKVPQVSTPTLVEVSRNLGKVGSKCCKHPEAKRMPCAEDYLSVVLNQLCVLHEKTPVSDRVTKCCTESLVNRRPCFSALEVDETYVPKEFNAETFTFHADICTLSEKERQIKKQTALVELVKHKPKATKEQLKAVMDDFAAFVEKCCKADDKETCFAEEGKKLVAASQAALGL

SEQ ID NO: 322 - protein, 995 aa, Artificial Sequence
  hCPN1 variant
VTFRHHRYDDLVRTLYKVQNECPGITRVYSIGRSVEGRHLYVLEFSDHPGIHEPLEPEVFYTGNMHGNEALGRELMLQLSEFLCEEFRNRNQRIVQLIQDTRIHILPSMNPDGYEVAAAQGPNKPGYLVGRNNANGVDLNRNFPDLNTYIYYNEKYGGPNHHLPLPDNWKSQVEPETRAFIRWMHSFNFVLAANLHGGAVVANYPYDKSFEHRVRGVRRTASTPTPDDKLFQKLAKVYSYAHGWMFQGWNCGDYFPDGITNGASWYSLSKGMQDFVYLHTNCFIITLELSCDKFPPEEELQREWLGNREALIQFLEQVHQGIKGMVLDENYNNLANAVISVSGINHDVTSGDHGDYFRLLLPGIYTVSATAPGYDPETVTVTVGPAEPTLVNFHLKRSGSSGGSSGGSSGDAHKSEVAHRFKDLGEENFKALVLIAFAQYLQQCPFEDHVKLVNEVTEFAKTCVADESAENCDKSLHTLFGDKLCTVATLRETYGEMADCCAKQEPERNECFLQHKDDNPNLPRLVRPEVDVMCTAFHDNEETFLKKYLYEIARRHPYFYAPELLFFAKRYKAAFTECCQAADKAACLLPKLDELRDEGKASSAKQRLKCASLQKFGERAFKAWAVARLSQRFPKAEFAEVSKLVTDLTKVHTECCHGDLLECADDRADLAKYICENQDSISSKLKECCEKPLLEKSHCIAEVENDEMPADLPSLAADFVESKDVCKNYAEAKDVFLGMFLYEYARRHPDYSVVLLLRLAKTYETTLEKCCAAADPHECYAKVFDEFKPLVEEPQNLIKQNCELFEQLGEYKFQNALLVRYTKKVPQVSTPTLVEVSRNLGKVGSKCCKHPEAKRMPCAEDYLSVVLNQLCVLHEKTPVSDRVTKCCTESLVNRRPCFSALEVDETYVPKEFNAETFTFHADICTLSEKERQIKKQTALVELVKHKPKATKEQLKAVMDDFAAFVEKCCKADDKETCFAEEGKKLVAASQAALGL

SEQ ID NO: 323 - protein, 995 aa, Artificial Sequence; identical to SEQ ID NO: 297
  hCPN1 variant

SEQ ID NO: 324 - protein, 995 aa, Artificial Sequence
  hCPN1 variant
VTFRHHRYDDLVRTLYKVQNECPGITRVYSIGRSVEGRHLYVLEFSDHPGIHEPLEPEVMYIGNMHGNEALGRELMLQLSEFLCEEFRNRNQRIVQLIQDTRIHILPSMNPDGYEVAAAQGPNKPGYLVGRNNANGVDLNRNFPDLNTYIYYNEKYGGPNHHLPLPDNWKSQVEPETRAIIRWFHSFNFVLAANLHGGAVVANYPYDKSFEHRVRGVRRTASTPTPDDKLFQKLAKVYSYAHGWMFQGWNCGDYFPDGITNGASWYSLSKGLQDFLYLHTNCFIITLELSCDKFPPEEELQREWLGNREALIQFLEQVHQGIKGMVLDENYNNLANAVISVSGINHDVTSGDHGDYFRLLLPGIYTVSATAPGYDPETVTVTVGPAEPTLVNFHLKRSGSSGGSSGGSSGDAHKSEVAHRFKDLGEENFKALVLIAFAQYLQQCPFEDHVKLVNEVTEFAKTCVADESAENCDKSLHTLFGDKLCTVATLRETYGEMADCCAKQEPERNECFLQHKDDNPNLPRLVRPEVDVMCTAFHDNEETFLKKYLYEIARRHPYFYAPELLFFAKRYKAAFTECCQAADKAACLLPKLDELRDEGKASSAKQRLKCASLQKFGERAFKAWAVARLSQRFPKAEFAEVSKLVTDLTKVHTECCHGDLLECADDRADLAKYICENQDSISSKLKECCEKPLLEKSHCIAEVENDEMPADLPSLAADFVESKDVCKNYAEAKDVFLGMFLYEYARRHPDYSVVLLLRLAKTYETTLEKCCAAADPHECYAKVFDEFKPLVEEPQNLIKQNCELFEQLGEYKFQNALLVRYTKKVPQVSTPTLVEVSRNLGKVGSKCCKHPEAKRMPCAEDYLSVVLNQLCVLHEKTPVSDRVTKCCTESLVNRRPCFSALEVDETYVPKEFNAETFTFHADICTLSEKERQIKKQTALVELVKHKPKATKEQLKAVMDDFAAFVEKCCKADDKETCFAEEGKKLVAASQAALGL

SEQ ID NO: 325 - protein, 995 aa, Artificial Sequence
  hCPN1 variant
VTFRHHRYDDLVRTLYKVQNECPGITRVYSIGRSVEGRHLYVLEFSDHPGIHEPLEPEVFYVGNMHGNEALGRELMLQLSEFLCEEFRNRNQRIVQLIQDTRIHILPSMNPDGYEVAAAQGPNKPGYLVGRNNANGVDLNRNFPDLNTYIYYNEKYGGPNHHLPLPDNWKSQVEPETRAYIRWMHSFNFVLAANLHGGAVVANYPYDKSFEHRVRGVRRTASTPTPDDKLFQKLAKVYSYAHGWMFQGWNCGDYFPDGITNGASWYSLSKGMQDFTYLHTNCFLITLELSCDKFPPEEELQREWLGNREALIQFLEQVHQGIKGMVLDENYNNLANAVISVSGINHDVTSGDHGDYFRLLLPGIYTVSATAPGYDPETVTVTVGPAEPTLVNFHLKRSGSSGGSSGGSSGDAHKSEVAHRFKDLGEENFKALVLIAFAQYLQQCPFEDHVKLVNEVTEFAKTCVADESAENCDKSLHTLFGDKLCTVATLRETYGEMADCCAKQEPERNECFLQHKDDNPNLPRLVRPEVDVMCTAFHDNEETFLKKYLYEIARRHPYFYAPELLFFAKRYKAAFTECCQAADKAACLLPKLDELRDEGKASSAKQRLKCASLQKFGERAFKAWAVARLSQRFPKAEFAEVSKLVTDLTKVHTECCHGDLLECADDRADLAKYICENQDSISSKLKECCEKPLLEKSHCIAEVENDEMPADLPSLAADFVESKDVCKNYAEAKDVFLGMFLYEYARRHPDYSVVLLLRLAKTYETTLEKCCAAADPHECYAKVFDEFKPLVEEPQNLIKQNCELFEQLGEYKFQNALLVRYTKKVPQVSTPTLVEVSRNLGKVGSKCCKHPEAKRMPCAEDYLSVVLNQLCVLHEKTPVSDRVTKCCTESLVNRRPCFSALEVDETYVPKEFNAETFTFHADICTLSEKERQIKKQTALVELVKHKPKATKEQLKAVMDDFAAFVEKCCKADDKETCFAEEGKKLVAASQAALGL

SEQ ID NO: 326 - protein, 995 aa, Artificial Sequence
  hCPN1 variant
VTFRHHRYDDLVRTLYKVQNECPGITRVYSIGRSVEGRHLYVLEFSDHPGIHEPLEPEVFYAGNMHGNEALGRELMLQLSEFLCEEFRNRNQRIVQLIQDTRIHILPSMNPDGYEVAAAQGPNKPGYLVGRNNANGVDLNRNFPDLNTYIYYNEKYGGPNHHLPLPDNWKSQVEPETRAYIRWLHSFNFVLAANLHGGAVVANYPYDKSFEHRVRGVRRTASTPTPDDKLFQKLAKVYSYAHGWMFQGWNCGDYFPDGITNGASWYSLSKGAQDFTYLHTNCFIITLELSCDKFPPEEELQREWLGNREALIQFLEQVHQGIKGMVLDENYNNLANAVISVSGINHDVTSGDHGDYFRLLLPGIYTVSATAPGYDPETVTVTVGPAEPTLVNFHLKRSGSSGGSSGGSSGDAHKSEVAHRFKDLGEENFKALVLIAFAQYLQQCPFEDHVKLVNEVTEFAKTCVADESAENCDKSLHTLFGDKLCTVATLRETYGEMADCCAKQEPERNECFLQHKDDNPNLPRLVRPEVDVMCTAFHDNEETFLKKYLYEIARRHPYFYAPELLFFAKRYKAAFTECCQAADKAACLLPKLDELRDEGKASSAKQRLKCASLQKFGERAFKAWAVARLSQRFPKAEFAEVSKLVTDLTKVHTECCHGDLLECADDRADLAKYICENQDSISSKLKECCEKPLLEKSHCIAEVENDEMPADLPSLAADFVESKDVCKNYAEAKDVFLGMFLYEYARRHPDYSVVLLLRLAKTYETTLEKCCAAADPHECYAKVFDEFKPLVEEPQNLIKQNCELFEQLGEYKFQNALLVRYTKKVPQVSTPTLVEVSRNLGKVGSKCCKHPEAKRMPCAEDYLSVVLNQLCVLHEKTPVSDRVTKCCTESLVNRRPCFSALEVDETYVPKEFNAETFTFHADICTLSEKERQIKKQTALVELVKHKPKATKEQLKAVMDDFAAFVEKCCKADDKETCFAEEGKKLVAASQAALGL

SEQ ID NO: 327 - protein, 995 aa, Artificial Sequence
  hCPN1 variant
VTFRHHRYDDLVRTLYKVQNECPGITRVYSIGRSVEGRHLYVLEFSDHPGIHEPLEPEVFYVGNMHGNEALGRELMLQLSEFLCEEFRNRNQRIVQLIQDTRIHILPSMNPDGYEVAAAQGPNKPGYLVGRNNANGVDLNRNFPDLNTYIYYNEKYGGPNHHLPLPDNWKSQVEPETRAYIRWMHSFNFVLAANLHGGAVVANYPYDKSFEHRVRGVRRTASTPTPDDKLFQKLAKVYSYAHGWMFQGWNCGDYFPDGITNGASWYSLSKGMQDFTYLHTNCFIITLELSCDKFPPEEELQREWLGNREALIQFLEQVHQGIKGMVLDENYNNLANAVISVSGINHDVTSGDHGDYFRLLLPGIYTVSATAPGYDPETVTVTVGPAEPTLVNFHLKRSGSSGGSSGGSSGDAHKSEVAHRFKDLGEENFKALVLIAFAQYLQQCPFEDHVKLVNEVTEFAKTCVADESAENCDKSLHTLFGDKLCTVATLRETYGEMADCCAKQEPERNECFLQHKDDNPNLPRLVRPEVDVMCTAFHDNEETFLKKYLYEIARRHPYFYAPELLFFAKRYKAAFTECCQAADKAACLLPKLDELRDEGKASSAKQRLKCASLQKFGERAFKAWAVARLSQRFPKAEFAEVSKLVTDLTKVHTECCHGDLLECADDRADLAKYICENQDSISSKLKECCEKPLLEKSHCIAEVENDEMPADLPSLAADFVESKDVCKNYAEAKDVFLGMFLYEYARRHPDYSVVLLLRLAKTYETTLEKCCAAADPHECYAKVFDEFKPLVEEPQNLIKQNCELFEQLGEYKFQNALLVRYTKKVPQVSTPTLVEVSRNLGKVGSKCCKHPEAKRMPCAEDYLSVVLNQLCVLHEKTPVSDRVTKCCTESLVNRRPCFSALEVDETYVPKEFNAETFTFHADICTLSEKERQIKKQTALVELVKHKPKATKEQLKAVMDDFAAFVEKCCKADDKETCFAEEGKKLVAASQAALGL

SEQ ID NO: 328 - protein, 995 aa, Artificial Sequence
  hCPN1 variant
VTFRHHRYDDLVRTLYKVQNECPGITRVYSIGRSVEGRHLYVLEFSDHPGIHEPLEPEVYYVGNMHGNEALGRELMLQLSEFLCEEFRNRNQRIVQLIQDTRIHILPSMNPDGYEVAAAQGPNKPGYLVGRNNANGVDLNRNFPDLNTYIYYNEKYGGPNHHLPLPDNWKSQVEPETRAYIRWLHSFNFVLAANLHGGAVVANYPYDKSFEHRVRGVRRTASTPTPDDKLFQKLAKVYSYAHGWMFQGWNCGDYFPDGITNGASWYSLSKGIQDFTYLHTNCFIITLELSCDKFPPEEELQREWLGNREALIQFLEQVHQGIKGMVLDENYNNLANAVISVSGINHDVTSGDHGDYFRLLLPGIYTVSATAPGYDPETVTVTVGPAEPTLVNFHLKRSGSSGGSSGGSSGDAHKSEVAHRFKDLGEENFKALVLIAFAQYLQQCPFEDHVKLVNEVTEFAKTCVADESAENCDKSLHTLFGDKLCTVATLRETYGEMADCCAKQEPERNECFLQHKDDNPNLPRLVRPEVDVMCTAFHDNEETFLKKYLYEIARRHPYFYAPELLFFAKRYKAAFTECCQAADKAACLLPKLDELRDEGKASSAKQRLKCASLQKFGERAFKAWAVARLSQRFPKAEFAEVSKLVTDLTKVHTECCHGDLLECADDRADLAKYICENQDSISSKLKECCEKPLLEKSHCIAEVENDEMPADLPSLAADFVESKDVCKNYAEAKDVFLGMFLYEYARRHPDYSVVLLLRLAKTYETTLEKCCAAADPHECYAKVFDEFKPLVEEPQNLIKQNCELFEQLGEYKFQNALLVRYTKKVPQVSTPTLVEVSRNLGKVGSKCCKHPEAKRMPCAEDYLSVVLNQLCVLHEKTPVSDRVTKCCTESLVNRRPCFSALEVDETYVPKEFNAETFTFHADICTLSEKERQIKKQTALVELVKHKPKATKEQLKAVMDDFAAFVEKCCKADDKETCFAEEGKKLVAASQAALGL

SEQ ID NO: 329 - protein, 995 aa, Artificial Sequence
  hCPN1 variant
VTFRHHRYDDLVRTLYKVQNECPGITRVYSIGRSVEGRHLYVLEFSDHPGIHEPLEPEVFYVGNMHGNEALGRELMLQLSEFLCEEFRNRNQRIVQLIQDTRIHILPSMNPDGYEVAAAQGPNKPGYLVGRNNANGVDLNRNFPDLNTYIYYNEKYGGPNHHLPLPDNWKSQVEPETRAFIRWMHSFNFVLAANLHGGAVVANYPYDKSFEHRVRGVRRTASTPTPDDKLFQKLAKVYSYAHGWMFQGWNCGDYFPDGITNGASWYSLSKGMQDFVYLHTNTFIITLELSCDKFPPEEELQREWLGNREALIQFLEQVHQGIKGMVLDENYNNLANAVISVSGINHDVTSGDHGDYFRLLLPGIYTVSATAPGYDPETVTVTVGPAEPTLVNFHLKRSGSSGGSSGGSSGDAHKSEVAHRFKDLGEENFKALVLIAFAQYLQQCPFEDHVKLVNEVTEFAKTCVADESAENCDKSLHTLFGDKLCTVATLRETYGEMADCCAKQEPERNECFLQHKDDNPNLPRLVRPEVDVMCTAFHDNEETFLKKYLYEIARRHPYFYAPELLFFAKRYKAAFTECCQAADKAACLLPKLDELRDEGKASSAKQRLKCASLQKFGERAFKAWAVARLSQRFPKAEFAEVSKLVTDLTKVHTECCHGDLLECADDRADLAKYICENQDSISSKLKECCEKPLLEKSHCIAEVENDEMPADLPSLAADFVESKDVCKNYAEAKDVFLGMFLYEYARRHPDYSVVLLLRLAKTYETTLEKCCAAADPHECYAKVFDEFKPLVEEPQNLIKQNCELFEQLGEYKFQNALLVRYTKKVPQVSTPTLVEVSRNLGKVGSKCCKHPEAKRMPCAEDYLSVVLNQLCVLHEKTPVSDRVTKCCTESLVNRRPCFSALEVDETYVPKEFNAETFTFHADICTLSEKERQIKKQTALVELVKHKPKATKEQLKAVMDDFAAFVEKCCKADDKETCFAEEGKKLVAASQAALGL

SEQ ID NO: 330 - protein, 995 aa, Artificial Sequence
  hCPN1 variant
VTFRHHRYDDLVRTLYKVQNECPGITRVYSIGRSVEGRHLYVLEFSDHPGIHEPLEPEVAYLGNMHGNEALGRELMLQLSEFLCEEFRNRNQRIVQLIQDTRIHILPSMNPDGYEVAAAQGPNKPGYLVGRNNANGVDLNRNFPDLNTYIYYNEKYGGPNHHLPLPDNWKSQVEPETRAVIRWLHSFNFVLMANLHGGAVVANYPYDKSFEHRVRGVRRTASTPTPDDKLFQKLAKVYSYAHGWMFQGWNCGDYFPDGITNGASWYSLSKGLQDFIYLHTNTFVITLELSCDKFPPEEELQREWLGNREALIQFLEQVHQGIKGMVLDENYNNLANAVISVSGINHDVTSGDHGDYFRLLLPGIYTVSATAPGYDPETVTVTVGPAEPTLVNFHLKRSGSSGGSSGGSSGDAHKSEVAHRFKDLGEENFKALVLIAFAQYLQQCPFEDHVKLVNEVTEFAKTCVADESAENCDKSLHTLFGDKLCTVATLRETYGEMADCCAKQEPERNECFLQHKDDNPNLPRLVRPEVDVMCTAFHDNEETFLKKYLYEIARRHPYFYAPELLFFAKRYKAAFTECCQAADKAACLLPKLDELRDEGKASSAKQRLKCASLQKFGERAFKAWAVARLSQRFPKAEFAEVSKLVTDLTKVHTECCHGDLLECADDRADLAKYICENQDSISSKLKECCEKPLLEKSHCIAEVENDEMPADLPSLAADFVESKDVCKNYAEAKDVFLGMFLYEYARRHPDYSVVLLLRLAKTYETTLEKCCAAADPHECYAKVFDEFKPLVEEPQNLIKQNCELFEQLGEYKFQNALLVRYTKKVPQVSTPTLVEVSRNLGKVGSKCCKHPEAKRMPCAEDYLSVVLNQLCVLHEKTPVSDRVTKCCTESLVNRRPCFSALEVDETYVPKEFNAETFTFHADICTLSEKERQIKKQTALVELVKHKPKATKEQLKAVMDDFAAFVEKCCKADDKETCFAEEGKKLVAASQAALGL

SEQ ID NO: 331 - protein, 995 aa, Artificial Sequence
  hCPN1 variant
VTFRHHRYDDLVRTLYKVQNECPGITRVYSIGRSVEGRHLYVLEFSDHPGIHEPLEPEVFYIGNMHGNEALGRELMLQLSEFLCEEFRNRNQRIVQLIQDTRIHILPSMNPDGYEVAAAQGPNKPGYLVGRNNANGVDLNRNFPDLNTYIYYNEKYGGPNHHLPLPDNWKSQVEPETRAIIRWLHSFNFVLAANLHGGAVVANYPYDKSFEHRVRGVRRTASTPTPDDKLFQKLAKVYSYAHGWMFQGWNCGDYFPDGITNGASWYSLSKGLQDFIYLHTNTFIITLELSCDKFPPEEELQREWLGNREALIQFLEQVHQGIKGMVLDENYNNLANAVISVSGINHDVTSGDHGDYFRLLLPGIYTVSATAPGYDPETVTVTVGPAEPTLVNFHLKRSGSSGGSSGGSSGDAHKSEVAHRFKDLGEENFKALVLIAFAQYLQQCPFEDHVKLVNEVTEFAKTCVADESAENCDKSLHTLFGDKLCTVATLRETYGEMADCCAKQEPERNECFLQHKDDNPNLPRLVRPEVDVMCTAFHDNEETFLKKYLYEIARRHPYFYAPELLFFAKRYKAAFTECCQAADKAACLLPKLDELRDEGKASSAKQRLKCASLQKFGERAFKAWAVARLSQRFPKAEFAEVSKLVTDLTKVHTECCHGDLLECADDRADLAKYICENQDSISSKLKECCEKPLLEKSHCIAEVENDEMPADLPSLAADFVESKDVCKNYAEAKDVFLGMFLYEYARRHPDYSVVLLLRLAKTYETTLEKCCAAADPHECYAKVFDEFKPLVEEPQNLIKQNCELFEQLGEYKFQNALLVRYTKKVPQVSTPTLVEVSRNLGKVGSKCCKHPEAKRMPCAEDYLSVVLNQLCVLHEKTPVSDRVTKCCTESLVNRRPCFSALEVDETYVPKEFNAETFTFHADICTLSEKERQIKKQTALVELVKHKPKATKEQLKAVMDDFAAFVEKCCKADDKETCFAEEGKKLVAASQAALGL

SEQ ID NO: 332 - protein, 995 aa, Artificial Sequence
  hCPN1 variant
VTFRHHRYDDLVRTLYKVQNECPGITRVYSIGRSVEGRHLYVLEFSDHPGIHEPLEPEVGYVGNMHGNEALGRELMLQLSEFLCEEFRNRNQRIVQLIQDTRIHILPSMNPDGYEVAAAQGPNKPGYLVGRNNANGVDLNRNFPDLNTYIYYNEKYGGPNHHLPLPDNWKSQVEPETRAFIRWMHSFNFVLMANLHGGAVVANYPYDKSFEHRVRGVRRTASTPTPDDKLFQKLAKVYSYAHGWMFQGWNCGDYFPDGITNGASWYSLSKGMQDFMYLHTNTFVITLELSCDKFPPEEELQREWLGNREALIQFLEQVHQGIKGMVLDENYNNLANAVISVSGINHDVTSGDHGDYFRLLLPGIYTVSATAPGYDPETVTVTVGPAEPTLVNFHLKRSGSSGGSSGGSSGDAHKSEVAHRFKDLGEENFKALVLIAFAQYLQQCPFEDHVKLVNEVTEFAKTCVADESAENCDKSLHTLFGDKLCTVATLRETYGEMADCCAKQEPERNECFLQHKDDNPNLPRLVRPEVDVMCTAFHDNEETFLKKYLYEIARRHPYFYAPELLFFAKRYKAAFTECCQAADKAACLLPKLDELRDEGKASSAKQRLKCASLQKFGERAFKAWAVARLSQRFPKAEFAEVSKLVTDLTKVHTECCHGDLLECADDRADLAKYICENQDSISSKLKECCEKPLLEKSHCIAEVENDEMPADLPSLAADFVESKDVCKNYAEAKDVFLGMFLYEYARRHPDYSVVLLLRLAKTYETTLEKCCAAADPHECYAKVFDEFKPLVEEPQNLIKQNCELFEQLGEYKFQNALLVRYTKKVPQVSTPTLVEVSRNLGKVGSKCCKHPEAKRMPCAEDYLSVVLNQLCVLHEKTPVSDRVTKCCTESLVNRRPCFSALEVDETYVPKEFNAETFTFHADICTLSEKERQIKKQTALVELVKHKPKATKEQLKAVMDDFAAFVEKCCKADDKETCFAEEGKKLVAASQAALGL

SEQ ID NO: 333 - protein, 995 aa, Artificial Sequence
  hCPN1 variant
VTFRHHRYDDLVRTLYKVQNECPGITRVYSIGRSVEGRHLYVLEFSDHPGIHEPLEPEVGYIGNMHGNEALGRELMLQLSEFLCEEFRNRNQRIVQLIQDTRIHILPSMNPDGYEVAAAQGPNKPGYLVGRNNANGVDLNRNFPDLNTYIYYNEKYGGPNHHLPLPDNWKSQVEPETRAIIRWQHSFNFVLQANLHGGAVVANYPYDKSFEHRVRGVRRTASTPTPDDKLFQKLAKVYSYAHGWMFQGWNCGDYFPDGITNGASWYSLSKGMQDFIYLHTNSFIITLELSCDKFPPEEELQREWLGNREALIQFLEQVHQGIKGMVLDENYNNLANAVISVSGINHDVTSGDHGDYFRLLLPGIYTVSATAPGYDPETVTVTVGPAEPTLVNFHLKRSGSSGGSSGGSSGDAHKSEVAHRFKDLGEENFKALVLIAFAQYLQQCPFEDHVKLVNEVTEFAKTCVADESAENCDKSLHTLFGDKLCTVATLRETYGEMADCCAKQEPERNECFLQHKDDNPNLPRLVRPEVDVMCTAFHDNEETFLKKYLYEIARRHPYFYAPELLFFAKRYKAAFTECCQAADKAACLLPKLDELRDEGKASSAKQRLKCASLQKFGERAFKAWAVARLSQRFPKAEFAEVSKLVTDLTKVHTECCHGDLLECADDRADLAKYICENQDSISSKLKECCEKPLLEKSHCIAEVENDEMPADLPSLAADFVESKDVCKNYAEAKDVFLGMFLYEYARRHPDYSVVLLLRLAKTYETTLEKCCAAADPHECYAKVFDEFKPLVEEPQNLIKQNCELFEQLGEYKFQNALLVRYTKKVPQVSTPTLVEVSRNLGKVGSKCCKHPEAKRMPCAEDYLSVVLNQLCVLHEKTPVSDRVTKCCTESLVNRRPCFSALEVDETYVPKEFNAETFTFHADICTLSEKERQIKKQTALVELVKHKPKATKEQLKAVMDDFAAFVEKCCKADDKETCFAEEGKKLVAASQAALGL

SEQ ID NO: 334 - protein, 995 aa, Artificial Sequence
  hCPN1 variant
VTFRHHRYDDLVRTLYKVQNECPGITRVYSIGRSVEGRHLYVLEFSDHPGIHEPLEPEVFYVGNMHGNEALGRELMLQLSEFLCEEFRNRNQRIVQLIQDTRIHILPSMNPDGYEVAAAQGPNKPGYLVGRNNANGVDLNRNFPDLNTYIYYNEKYGGPNHHLPLPDNWKSQVEPETRAVIRWMHSFNFVLAANLHGGAVVANYPYDKSFEHRVRGVRRTASTPTPDDKLFQKLAKVYSYAHGWMFQGWNCGDYFPDGITNGASWYSLSKGMQDFWYLHTNCFVITLELSCDKFPPEEELQREWLGNREALIQFLEQVHQGIKGMVLDENYNNLANAVISVSGINHDVTSGDHGDYFRLLLPGIYTVSATAPGYDPETVTVTVGPAEPTLVNFHLKRSGSSGGSSGGSSGDAHKSEVAHRFKDLGEENFKALVLIAFAQYLQQCPFEDHVKLVNEVTEFAKTCVADESAENCDKSLHTLFGDKLCTVATLRETYGEMADCCAKQEPERNECFLQHKDDNPNLPRLVRPEVDVMCTAFHDNEETFLKKYLYEIARRHPYFYAPELLFFAKRYKAAFTECCQAADKAACLLPKLDELRDEGKASSAKQRLKCASLQKFGERAFKAWAVARLSQRFPKAEFAEVSKLVTDLTKVHTECCHGDLLECADDRADLAKYICENQDSISSKLKECCEKPLLEKSHCIAEVENDEMPADLPSLAADFVESKDVCKNYAEAKDVFLGMFLYEYARRHPDYSVVLLLRLAKTYETTLEKCCAAADPHECYAKVFDEFKPLVEEPQNLIKQNCELFEQLGEYKFQNALLVRYTKKVPQVSTPTLVEVSRNLGKVGSKCCKHPEAKRMPCAEDYLSVVLNQLCVLHEKTPVSDRVTKCCTESLVNRRPCFSALEVDETYVPKEFNAETFTFHADICTLSEKERQIKKQTALVELVKHKPKATKEQLKAVMDDFAAFVEKCCKADDKETCFAEEGKKLVAASQAALGL

SEQ ID NO: 335 - protein, 995 aa, Artificial Sequence
  hCPN1 variant
VTFRHHRYDDLVRTLYKVQNECPGITRVYSIGRSVEGRHLYVLEFSDHPGIHEPLEPEVGYVGNMHGNEALGRELMLQLSEFLCEEFRNRNQRIVQLIQDTRIHILPSMNPDGYEVAAAQGPNKPGYLVGRNNANGVDLNRNFPDLNTYIYYNEKYGGPNHHLPLPDNWKSQVEPETRAVIRWMHSFNFVLMANLHGGAVVANYPYDKSFEHRVRGVRRTASTPTPDDKLFQKLAKVYSYAHGWMFQGWNCGDYFPDGITNGASWYSLSKGMQDFWYLHTNCFVITLELSCDKFPPEEELQREWLGNREALIQFLEQVHQGIKGMVLDENYNNLANAVISVSGINHDVTSGDHGDYFRLLLPGIYTVSATAPGYDPETVTVTVGPAEPTLVNFHLKRSGSSGGSSGGSSGDAHKSEVAHRFKDLGEENFKALVLIAFAQYLQQCPFEDHVKLVNEVTEFAKTCVADESAENCDKSLHTLFGDKLCTVATLRETYGEMADCCAKQEPERNECFLQHKDDNPNLPRLVRPEVDVMCTAFHDNEETFLKKYLYEIARRHPYFYAPELLFFAKRYKAAFTECCQAADKAACLLPKLDELRDEGKASSAKQRLKCASLQKFGERAFKAWAVARLSQRFPKAEFAEVSKLVTDLTKVHTECCHGDLLECADDRADLAKYICENQDSISSKLKECCEKPLLEKSHCIAEVENDEMPADLPSLAADFVESKDVCKNYAEAKDVFLGMFLYEYARRHPDYSVVLLLRLAKTYETTLEKCCAAADPHECYAKVFDEFKPLVEEPQNLIKQNCELFEQLGEYKFQNALLVRYTKKVPQVSTPTLVEVSRNLGKVGSKCCKHPEAKRMPCAEDYLSVVLNQLCVLHEKTPVSDRVTKCCTESLVNRRPCFSALEVDETYVPKEFNAETFTFHADICTLSEKERQIKKQTALVELVKHKPKATKEQLKAVMDDFAAFVEKCCKADDKETCFAEEGKKLVAASQAALGL

SEQ ID NO: 336 - protein, 995 aa, Artificial Sequence
  hCPN1 variant
VTFRHHRYDDLVRTLYKVQNECPGITRVYSIGRSVEGRHLYVLEFSDHPGIHEPLEPEVAYVGNMHGNEALGRELMLQLSEFLCEEFRNRNQRIVQLIQDTRIHILPSMNPDGYEVAAAQGPNKPGYLVGRNNANGVDLNRNFPDLNTYIYYNEKYGGPNHHLPLPDNWKSQVEPETRAVIRWMHSFNFVLMANLHGGAVVANYPYDKSFEHRVRGVRRTASTPTPDDKLFQKLAKVYSYAHGWMFQGWNCGDYFPDGITNGASWYSLSKGMQDFIYLHTNCFVITLELSCDKFPPEEELQREWLGNREALIQFLEQVHQGIKGMVLDENYNNLANAVISVSGINHDVTSGDHGDYFRLLLPGIYTVSATAPGYDPETVTVTVGPAEPTLVNFHLKRSGSSGGSSGGSSGDAHKSEVAHRFKDLGEENFKALVLIAFAQYLQQCPFEDHVKLVNEVTEFAKTCVADESAENCDKSLHTLFGDKLCTVATLRETYGEMADCCAKQEPERNECFLQHKDDNPNLPRLVRPEVDVMCTAFHDNEETFLKKYLYEIARRHPYFYAPELLFFAKRYKAAFTECCQAADKAACLLPKLDELRDEGKASSAKQRLKCASLQKFGERAFKAWAVARLSQRFPKAEFAEVSKLVTDLTKVHTECCHGDLLECADDRADLAKYICENQDSISSKLKECCEKPLLEKSHCIAEVENDEMPADLPSLAADFVESKDVCKNYAEAKDVFLGMFLYEYARRHPDYSVVLLLRLAKTYETTLEKCCAAADPHECYAKVFDEFKPLVEEPQNLIKQNCELFEQLGEYKFQNALLVRYTKKVPQVSTPTLVEVSRNLGKVGSKCCKHPEAKRMPCAEDYLSVVLNQLCVLHEKTPVSDRVTKCCTESLVNRRPCFSALEVDETYVPKEFNAETFTFHADICTLSEKERQIKKQTALVELVKHKPKATKEQLKAVMDDFAAFVEKCCKADDKETCFAEEGKKLVAASQAALGL

SEQ ID NO: 337 - protein, 995 aa, Artificial Sequence
  hCPN1 variant
VTFRHHRYDDLVRTLYKVQNECPGITRVYSIGRSVEGRHLYVLEFSDHPGIHEPLEPEVFYVGNMHGNEALGRELMLQLSEFLCEEFRNRNQRIVQLIQDTRIHILPSMNPDGYEVAAAQGPNKPGYLVGRNNANGVDLNRNFPDLNTYIYYNEKYGGPNHHLPLPDNWKSQVEPETRAVIRWMHSFNFVLAANLHGGAVVANYPYDKSFEHRVRGVRRTASTPTPDDKLFQKLAKVYSYAHGWMFQGWNCGDYFPDGITNGASWYSLSKGMQDFWYLHTNTFVITLELSCDKFPPEEELQREWLGNREALIQFLEQVHQGIKGMVLDENYNNLANAVISVSGINHDVTSGDHGDYFRLLLPGIYTVSATAPGYDPETVTVTVGPAEPTLVNFHLKRSGSSGGSSGGSSGDAHKSEVAHRFKDLGEENFKALVLIAFAQYLQQCPFEDHVKLVNEVTEFAKTCVADESAENCDKSLHTLFGDKLCTVATLRETYGEMADCCAKQEPERNECFLQHKDDNPNLPRLVRPEVDVMCTAFHDNEETFLKKYLYEIARRHPYFYAPELLFFAKRYKAAFTECCQAADKAACLLPKLDELRDEGKASSAKQRLKCASLQKFGERAFKAWAVARLSQRFPKAEFAEVSKLVTDLTKVHTECCHGDLLECADDRADLAKYICENQDSISSKLKECCEKPLLEKSHCIAEVENDEMPADLPSLAADFVESKDVCKNYAEAKDVFLGMFLYEYARRHPDYSVVLLLRLAKTYETTLEKCCAAADPHECYAKVFDEFKPLVEEPQNLIKQNCELFEQLGEYKFQNALLVRYTKKVPQVSTPTLVEVSRNLGKVGSKCCKHPEAKRMPCAEDYLSVVLNQLCVLHEKTPVSDRVTKCCTESLVNRRPCFSALEVDETYVPKEFNAETFTFHADICTLSEKERQIKKQTALVELVKHKPKATKEQLKAVMDDFAAFVEKCCKADDKETCFAEEGKKLVAASQAALGL

SEQ ID NO: 338 - protein, 995 aa, Artificial Sequence
  hCPN1 variant
VTFRHHRYDDLVRTLYKVQNECPGITRVYSIGRSVEGRHLYVLEFSDHPGIHEPLEPEVGYVGNMHGNEALGRELMLQLSEFLCEEFRNRNQRIVQLIQDTRIHILPSMNPDGYEVAAAQGPNKPGYLVGRNNANGVDLNRNFPDLNTYIYYNEKYGGPNHHLPLPDNWKSQVEPETRAVIRWMHSFNFVLAANLHGGAVVANYPYDKSFEHRVRGVRRTASTPTPDDKLFQKLAKVYSYAHGWMFQGWNCGDYFPDGITNGASWYSLSKGMQDFWYLHTNTFVITLELSCDKFPPEEELQREWLGNREALIQFLEQVHQGIKGMVLDENYNNLANAVISVSGINHDVTSGDHGDYFRLLLPGIYTVSATAPGYDPETVTVTVGPAEPTLVNFHLKRSGSSGGSSGGSSGDAHKSEVAHRFKDLGEENFKALVLIAFAQYLQQCPFEDHVKLVNEVTEFAKTCVADESAENCDKSLHTLFGDKLCTVATLRETYGEMADCCAKQEPERNECFLQHKDDNPNLPRLVRPEVDVMCTAFHDNEETFLKKYLYEIARRHPYFYAPELLFFAKRYKAAFTECCQAADKAACLLPKLDELRDEGKASSAKQRLKCASLQKFGERAFKAWAVARLSQRFPKAEFAEVSKLVTDLTKVHTECCHGDLLECADDRADLAKYICENQDSISSKLKECCEKPLLEKSHCIAEVENDEMPADLPSLAADFVESKDVCKNYAEAKDVFLGMFLYEYARRHPDYSVVLLLRLAKTYETTLEKCCAAADPHECYAKVFDEFKPLVEEPQNLIKQNCELFEQLGEYKFQNALLVRYTKKVPQVSTPTLVEVSRNLGKVGSKCCKHPEAKRMPCAEDYLSVVLNQLCVLHEKTPVSDRVTKCCTESLVNRRPCFSALEVDETYVPKEFNAETFTFHADICTLSEKERQIKKQTALVELVKHKPKATKEQLKAVMDDFAAFVEKCCKADDKETCFAEEGKKLVAASQAALGL

SEQ ID NO: 339 - protein, 995 aa, Artificial Sequence
  hCPN1 variant
VTFRHHRYDDLVRTLYKVQNECPGITRVYSIGRSVEGRHLYVLEFSDHPGIHEPLEPEVFYVGNMHGNEALGRELMLQLSEFLCEEFRNRNQRIVQLIQDTRIHILPSMNPDGYEVAAAQGPNKPGYLVGRNNANGVDLNRNFPDLNTYIYYNEKYGGPNHHLPLPDNWKSQVEPETRAVIRWMHSFNFVLAANLHGGAVVANYPYDKSFEHRVRGVRRTASTPTPDDKLFQKLAKVYSYAHGWMFQGWNCGDYFPDGITNGASWYSLSKGMQDFWYLHTNLFVITLELSCDKFPPEEELQREWLGNREALIQFLEQVHQGIKGMVLDENYNNLANAVISVSGINHDVTSGDHGDYFRLLLPGIYTVSATAPGYDPETVTVTVGPAEPTLVNFHLKRSGSSGGSSGGSSGDAHKSEVAHRFKDLGEENFKALVLIAFAQYLQQCPFEDHVKLVNEVTEFAKTCVADESAENCDKSLHTLFGDKLCTVATLRETYGEMADCCAKQEPERNECFLQHKDDNPNLPRLVRPEVDVMCTAFHDNEETFLKKYLYEIARRHPYFYAPELLFFAKRYKAAFTECCQAADKAACLLPKLDELRDEGKASSAKQRLKCASLQKFGERAFKAWAVARLSQRFPKAEFAEVSKLVTDLTKVHTECCHGDLLECADDRADLAKYICENQDSISSKLKECCEKPLLEKSHCIAEVENDEMPADLPSLAADFVESKDVCKNYAEAKDVFLGMFLYEYARRHPDYSVVLLLRLAKTYETTLEKCCAAADPHECYAKVFDEFKPLVEEPQNLIKQNCELFEQLGEYKFQNALLVRYTKKVPQVSTPTLVEVSRNLGKVGSKCCKHPEAKRMPCAEDYLSVVLNQLCVLHEKTPVSDRVTKCCTESLVNRRPCFSALEVDETYVPKEFNAETFTFHADICTLSEKERQIKKQTALVELVKHKPKATKEQLKAVMDDFAAFVEKCCKADDKETCFAEEGKKLVAASQAALGL

SEQ ID NO: 340 - protein, 995 aa, Artificial Sequence
  hCPN1 variant
VTFRHHRYDDLVRTLYKVQNECPGITRVYSIGRSVEGRHLYVLEFSDHPGIHEPLEPEVKYVGNMHGNEALGRELMLQLSEFLCEEFRNRNQRIVQLIQDTRIHILPSMNPDGYEVAAAQGPNKPGYLVGRNNANGVDLNRNFPDLNTYIYYNEKYGGPNHHLPLPDNWKSQVEPETRAVIRWMHSFNFVLSANLHGGAVVANYPYDKSFEHRVRGVRRTASTPTPDDKLFQKLAKVYSYAHGWMFQGWNCGDYFPDGITNGASWFSLSKGMQDFNYLHTNCFEITLQLSCDKFPPEEELQREWLGNREALIQFLEQVHQGIKGMVLDENYNNLANAVISVSGINHDVTSGDHGDYFRLLLPGIYTVSATAPGYDPETVTVTVGPAEPTLVNFHLKRSGSSGGSSGGSSGDAHKSEVAHRFKDLGEENFKALVLIAFAQYLQQCPFEDHVKLVNEVTEFAKTCVADESAENCDKSLHTLFGDKLCTVATLRETYGEMADCCAKQEPERNECFLQHKDDNPNLPRLVRPEVDVMCTAFHDNEETFLKKYLYEIARRHPYFYAPELLFFAKRYKAAFTECCQAADKAACLLPKLDELRDEGKASSAKQRLKCASLQKFGERAFKAWAVARLSQRFPKAEFAEVSKLVTDLTKVHTECCHGDLLECADDRADLAKYICENQDSISSKLKECCEKPLLEKSHCIAEVENDEMPADLPSLAADFVESKDVCKNYAEAKDVFLGMFLYEYARRHPDYSVVLLLRLAKTYETTLEKCCAAADPHECYAKVFDEFKPLVEEPQNLIKQNCELFEQLGEYKFQNALLVRYTKKVPQVSTPTLVEVSRNLGKVGSKCCKHPEAKRMPCAEDYLSVVLNQLCVLHEKTPVSDRVTKCCTESLVNRRPCFSALEVDETYVPKEFNAETFTFHADICTLSEKERQIKKQTALVELVKHKPKATKEQLKAVMDDFAAFVEKCCKADDKETCFAEEGKKLVAASQAALGL

SEQ ID NO: 341 - protein, 1002 aa, Artificial Sequence
  hCPN1 variant
VTFRHHRYDDLVRTLYKVQNECPGITRVYSIGRSVEGRHLYVLEFSDHPGIHEPLEPEVKYVGNMHGNEALGRELMLQLSEFLCEEFRNRNQRIVQLIQDTRIHILPSMNPDGYEVAAAQGPNKPGYLVGRNNANGVDLNRNFPDLNTYIYYNEKYGGPNHHLPLPDNWKSQVEPETRAVIRWMHSFNFVLSANLHGGAVVANYPYDKSFEHRVRGVRRTASTPTPDDKLFQKLAKVYSYAHGWMFQGWNCGDYFPDGITNGASWFSLSKGMQDFNYLHTNCFEITLQLSCDKFPPEEELQREWLGNREALIQFLEQVHQGIKGMVLDENYNNLANAVISVSGINHDVTSGDHGDYFRLLLPGIYTVSATAPGYDPETVTVTVGPAEPTLVNFHLKRSENLYFQGGSSGGSSGGSSGDAHKSEVAHRFKDLGEENFKALVLIAFAQYLQQCPFEDHVKLVNEVTEFAKTCVADESAENCDKSLHTLFGDKLCTVATLRETYGEMADCCAKQEPERNECFLQHKDDNPNLPRLVRPEVDVMCTAFHDNEETFLKKYLYEIARRHPYFYAPELLFFAKRYKAAFTECCQAADKAACLLPKLDELRDEGKASSAKQRLKCASLQKFGERAFKAWAVARLSQRFPKAEFAEVSKLVTDLTKVHTECCHGDLLECADDRADLAKYICENQDSISSKLKECCEKPLLEKSHCIAEVENDEMPADLPSLAADFVESKDVCKNYAEAKDVFLGMFLYEYARRHPDYSVVLLLRLAKTYETTLEKCCAAADPHECYAKVFDEFKPLVEEPQNLIKQNCELFEQLGEYKFQNALLVRYTKKVPQVSTPTLVEVSRNLGKVGSKCCKHPEAKRMPCAEDYLSVVLNQLCVLHEKTPVSDRVTKCCTESLVNRRPCFSALEVDETYVPKEFNAETFTFHADICTLSEKERQIKKQTALVELVKHKPKATKEQLKAVMDDFAAFVEKCCKADDKETCFAEEGKKLVAASQAALGL

SEQ ID NO: 342 - protein, 995 aa, Artificial Sequence
  hCPN1 variant
VTFRHHRYDDLVRTLYKVQNECPGITRVYSIGRSVEGRHLYVLEFSDHPGIHEPLEPEVKYVGNMHGNEALGRELMLQLSEFLCEEFRNRNQRIVQLIQDTRIHILPSMNPDGYEVAAAQGPNKPGYLVGRNNANGVDLNRNFPDLNTYIYYNEKYGGPNHHLPLPDNWKSQVEPETRAVIRWMHSFNFVLSANLHGGAVVANYPYDKSFEHRVRGVRRTASTPTPDDKLFQKLAKVYSYAHGAMFQGWNCGDYFPDGITNGASWYSLSKGMQDFNYLHTNCFEITLELSCDKFPPEEELQREWLGNREALIQFLEQVHQGIKGMVLDENYNNLANAVISVSGINHDVTSGDHGDYFRLLLPGIYTVSATAPGYDPETVTVTVGPAEPTLVNFHLKRSGSSGGSSGGSSGDAHKSEVAHRFKDLGEENFKALVLIAFAQYLQQCPFEDHVKLVNEVTEFAKTCVADESAENCDKSLHTLFGDKLCTVATLRETYGEMADCCAKQEPERNECFLQHKDDNPNLPRLVRPEVDVMCTAFHDNEETFLKKYLYEIARRHPYFYAPELLFFAKRYKAAFTECCQAADKAACLLPKLDELRDEGKASSAKQRLKCASLQKFGERAFKAWAVARLSQRFPKAEFAEVSKLVTDLTKVHTECCHGDLLECADDRADLAKYICENQDSISSKLKECCEKPLLEKSHCIAEVENDEMPADLPSLAADFVESKDVCKNYAEAKDVFLGMFLYEYARRHPDYSVVLLLRLAKTYETTLEKCCAAADPHECYAKVFDEFKPLVEEPQNLIKQNCELFEQLGEYKFQNALLVRYTKKVPQVSTPTLVEVSRNLGKVGSKCCKHPEAKRMPCAEDYLSVVLNQLCVLHEKTPVSDRVTKCCTESLVNRRPCFSALEVDETYVPKEFNAETFTFHADICTLSEKERQIKKQTALVELVKHKPKATKEQLKAVMDDFAAFVEKCCKADDKETCFAEEGKKLVAASQAALGL

SEQ ID NO: 343 - protein, 995 aa, Artificial Sequence
  hCPN1 variant
VTFRHHRYDDLVRTLYKVQNECPGITRVYSIGRSVEGRHLYVLEFSDHPGIHEPLEPEVKYVGNMHGNEALGRELMLQLSEFLCEEFRNRNQRIVQLIQDTRIHILPSMNPDGYEVAAAQGPNKPGYLVGRNNANGVDLNRNFPDLNTYIYYNEKYGGPNHHLPLPDNWKSQVEPETRAVIRWMHSFNFVLSANLHGGAVVANYPYDKSFEHRVRGVRRTASTPTPDDKLFQKLAKVYSYAHGWMFAGWNCGDYFPDGITNGASWYSLSKGMQDFNYLHTNCFEITLELSCDKFPPEEELQREWLGNREALIQFLEQVHQGIKGMVLDENYNNLANAVISVSGINHDVTSGDHGDYFRLLLPGIYTVSATAPGYDPETVTVTVGPAEPTLVNFHLKRSGSSGGSSGGSSGDAHKSEVAHRFKDLGEENFKALVLIAFAQYLQQCPFEDHVKLVNEVTEFAKTCVADESAENCDKSLHTLFGDKLCTVATLRETYGEMADCCAKQEPERNECFLQHKDDNPNLPRLVRPEVDVMCTAFHDNEETFLKKYLYEIARRHPYFYAPELLFFAKRYKAAFTECCQAADKAACLLPKLDELRDEGKASSAKQRLKCASLQKFGERAFKAWAVARLSQRFPKAEFAEVSKLVTDLTKVHTECCHGDLLECADDRADLAKYICENQDSISSKLKECCEKPLLEKSHCIAEVENDEMPADLPSLAADFVESKDVCKNYAEAKDVFLGMFLYEYARRHPDYSVVLLLRLAKTYETTLEKCCAAADPHECYAKVFDEFKPLVEEPQNLIKQNCELFEQLGEYKFQNALLVRYTKKVPQVSTPTLVEVSRNLGKVGSKCCKHPEAKRMPCAEDYLSVVLNQLCVLHEKTPVSDRVTKCCTESLVNRRPCFSALEVDETYVPKEFNAETFTFHADICTLSEKERQIKKQTALVELVKHKPKATKEQLKAVMDDFAAFVEKCCKADDKETCFAEEGKKLVAASQAALGL

SEQ ID NO: 344 - protein, 995 aa, Artificial Sequence
  hCPN1 variant
VTFRHHRYDDLVRTLYKVQNECPGITRVYSIGRSVEGRHLYVLEFSDHPGIHEPLEPEVKYVGNMHGNEALGRELMLQLSEFLCEEFRNRNQRIVQLIQDTRIHILPSMNPDGYEVAAAQGPNKPGYLVGRNNANGVDLNRNFPDLNTYIYYNEKYGGPNHHLPLPDNWKSQVEPETRAVIRWMHSFNFVLSANLHGGAVVANYPYDKSFEHRVRGVRRTASTPTPDDKLFQKLAKVYSYAHGWMFQGANCGDYFPDGITNGASWYSLSKGMQDFNYLHTNCFEITLELSCDKFPPEEELQREWLGNREALIQFLEQVHQGIKGMVLDENYNNLANAVISVSGINHDVTSGDHGDYFRLLLPGIYTVSATAPGYDPETVTVTVGPAEPTLVNFHLKRSGSSGGSSGGSSGDAHKSEVAHRFKDLGEENFKALVLIAFAQYLQQCPFEDHVKLVNEVTEFAKTCVADESAENCDKSLHTLFGDKLCTVATLRETYGEMADCCAKQEPERNECFLQHKDDNPNLPRLVRPEVDVMCTAFHDNEETFLKKYLYEIARRHPYFYAPELLFFAKRYKAAFTECCQAADKAACLLPKLDELRDEGKASSAKQRLKCASLQKFGERAFKAWAVARLSQRFPKAEFAEVSKLVTDLTKVHTECCHGDLLECADDRADLAKYICENQDSISSKLKECCEKPLLEKSHCIAEVENDEMPADLPSLAADFVESKDVCKNYAEAKDVFLGMFLYEYARRHPDYSVVLLLRLAKTYETTLEKCCAAADPHECYAKVFDEFKPLVEEPQNLIKQNCELFEQLGEYKFQNALLVRYTKKVPQVSTPTLVEVSRNLGKVGSKCCKHPEAKRMPCAEDYLSVVLNQLCVLHEKTPVSDRVTKCCTESLVNRRPCFSALEVDETYVPKEFNAETFTFHADICTLSEKERQIKKQTALVELVKHKPKATKEQLKAVMDDFAAFVEKCCKADDKETCFAEEGKKLVAASQAALGL

SEQ ID NO: 345 - protein, 995 aa, Artificial Sequence
  hCPN1 variant
VTFRHHRYDDLVRTLYKVQNECPGITRVYSIGRSVEGRHLYVLEFSDHPGIHEPLEPEVKYVGNMHGNEALGRELMLQLSEFLCEEFRNRNQRIVQLIQDTRIHILPSMNPDGYEVAAAQGPNKPGYLVGRNNANGVDLNRNFPDLNTYIYYNEKYGGPNHHLPLPDNWKSQVEPETRAVIRWMHSFNFVLSANLHGGAVVANYPYDKSFEHRVRGVRRTASTPTPDDKLFQKLAKVYSYAHGWMFQGWNCGAYFPDGITNGASWYSLSKGMQDFNYLHTNCFEITLELSCDKFPPEEELQREWLGNREALIQFLEQVHQGIKGMVLDENYNNLANAVISVSGINHDVTSGDHGDYFRLLLPGIYTVSATAPGYDPETVTVTVGPAEPTLVNFHLKRSGSSGGSSGGSSGDAHKSEVAHRFKDLGEENFKALVLIAFAQYLQQCPFEDHVKLVNEVTEFAKTCVADESAENCDKSLHTLFGDKLCTVATLRETYGEMADCCAKQEPERNECFLQHKDDNPNLPRLVRPEVDVMCTAFHDNEETFLKKYLYEIARRHPYFYAPELLFFAKRYKAAFTECCQAADKAACLLPKLDELRDEGKASSAKQRLKCASLQKFGERAFKAWAVARLSQRFPKAEFAEVSKLVTDLTKVHTECCHGDLLECADDRADLAKYICENQDSISSKLKECCEKPLLEKSHCIAEVENDEMPADLPSLAADFVESKDVCKNYAEAKDVFLGMFLYEYARRHPDYSVVLLLRLAKTYETTLEKCCAAADPHECYAKVFDEFKPLVEEPQNLIKQNCELFEQLGEYKFQNALLVRYTKKVPQVSTPTLVEVSRNLGKVGSKCCKHPEAKRMPCAEDYLSVVLNQLCVLHEKTPVSDRVTKCCTESLVNRRPCFSALEVDETYVPKEFNAETFTFHADICTLSEKERQIKKQTALVELVKHKPKATKEQLKAVMDDFAAFVEKCCKADDKETCFAEEGKKLVAASQAALGL

SEQ ID NO: 346 - protein, 995 aa, Artificial Sequence
  hCPN1 variant
VTFRHHRYDDLVRTLYKVQNECPGITRVYSIGRSVEGRHLYVLEFSDHPGIHEPLEPEVKYVGNMHGNEALGRELMLQLSEFLCEEFRNRNQRIVQLIQDTRIHILPSMNPDGYEVAAAQGPNKPGYLVGRNNANGVDLNRNFPDLNTYIYYNEKYGGPNHHLPLPDNWKSQVEPETRAVIRWMHSFNFVLSANLHGGAVVANYPYDKSFEHRVRGVRRTASTPTPDDKLFQKLAKVYSYAHGWMFQGWNCGDAFPDGITNGASWYSLSKGMQDFNYLHTNCFEITLELSCDKFPPEEELQREWLGNREALIQFLEQVHQGIKGMVLDENYNNLANAVISVSGINHDVTSGDHGDYFRLLLPGIYTVSATAPGYDPETVTVTVGPAEPTLVNFHLKRSGSSGGSSGGSSGDAHKSEVAHRFKDLGEENFKALVLIAFAQYLQQCPFEDHVKLVNEVTEFAKTCVADESAENCDKSLHTLFGDKLCTVATLRETYGEMADCCAKQEPERNECFLQHKDDNPNLPRLVRPEVDVMCTAFHDNEETFLKKYLYEIARRHPYFYAPELLFFAKRYKAAFTECCQAADKAACLLPKLDELRDEGKASSAKQRLKCASLQKFGERAFKAWAVARLSQRFPKAEFAEVSKLVTDLTKVHTECCHGDLLECADDRADLAKYICENQDSISSKLKECCEKPLLEKSHCIAEVENDEMPADLPSLAADFVESKDVCKNYAEAKDVFLGMFLYEYARRHPDYSVVLLLRLAKTYETTLEKCCAAADPHECYAKVFDEFKPLVEEPQNLIKQNCELFEQLGEYKFQNALLVRYTKKVPQVSTPTLVEVSRNLGKVGSKCCKHPEAKRMPCAEDYLSVVLNQLCVLHEKTPVSDRVTKCCTESLVNRRPCFSALEVDETYVPKEFNAETFTFHADICTLSEKERQIKKQTALVELVKHKPKATKEQLKAVMDDFAAFVEKCCKADDKETCFAEEGKKLVAASQAALGL

SEQ ID NO: 347 - protein, 995 aa, Artificial Sequence
  hCPN1 variant
VTFRHHRYDDLVRTLYKVQNECPGITRVYSIGRSVEGRHLYVLEFSDHPGIHEPLEPEVKYVGNMHGNEALGRELMLQLSEFLCEEFRNRNQRIVQLIQDTRIHILPSMNPDGYEVAAAQGPNKPGYLVGRNNANGVDLNRNFPDLNTYIYYNEKYGGPNHHLPLPDNWKSQVEPETRAVIRWMHSFNFVLSANLHGGAVVANYPYDKSFEHRVRGVRRTASTPTPDDKLFQKLAKVYSYAHGWMFQGWNCGDYFPDGITNGASWYSLSKGMQDFNYLHTNCFEITLELSCAKFPPEEELQREWLGNREALIQFLEQVHQGIKGMVLDENYNNLANAVISVSGINHDVTSGDHGDYFRLLLPGIYTVSATAPGYDPETVTVTVGPAEPTLVNFHLKRSGSSGGSSGGSSGDAHKSEVAHRFKDLGEENFKALVLIAFAQYLQQCPFEDHVKLVNEVTEFAKTCVADESAENCDKSLHTLFGDKLCTVATLRETYGEMADCCAKQEPERNECFLQHKDDNPNLPRLVRPEVDVMCTAFHDNEETFLKKYLYEIARRHPYFYAPELLFFAKRYKAAFTECCQAADKAACLLPKLDELRDEGKASSAKQRLKCASLQKFGERAFKAWAVARLSQRFPKAEFAEVSKLVTDLTKVHTECCHGDLLECADDRADLAKYICENQDSISSKLKECCEKPLLEKSHCIAEVENDEMPADLPSLAADFVESKDVCKNYAEAKDVFLGMFLYEYARRHPDYSVVLLLRLAKTYETTLEKCCAAADPHECYAKVFDEFKPLVEEPQNLIKQNCELFEQLGEYKFQNALLVRYTKKVPQVSTPTLVEVSRNLGKVGSKCCKHPEAKRMPCAEDYLSVVLNQLCVLHEKTPVSDRVTKCCTESLVNRRPCFSALEVDETYVPKEFNAETFTFHADICTLSEKERQIKKQTALVELVKHKPKATKEQLKAVMDDFAAFVEKCCKADDKETCFAEEGKKLVAASQAALGL

SEQ ID NO: 348 - protein, 995 aa, Artificial Sequence
  hCPN1 variant
VTFRHHRYDDLVRTLYKVQNECPGITRVYSIGRSVEGRHLYVLEFSDHPGIHEPLEPEVKYVGNMHGNEALGRELMLQLSEFLCEEFRNRNQRIVQLIQDTRIHILPSMNPDGYEVAAAQGPNKPGYLVGRNNANGVDLNRNFPDLNTYIYYNEKYGGPNHHLPLPDNWKSQVEPETRAVIRWMHSFNFVLSANLHGGAVVANYPYDKSFEHRVRGVRRTASTPTPDDKLFQKLAKVYSYAHGWMFQGWNCGDYFPDGITNGASWYSLSKGMQDFNYLHTNCFEITLELSCDKFPPEAELQREWLGNREALIQFLEQVHQGIKGMVLDENYNNLANAVISVSGINHDVTSGDHGDYFRLLLPGIYTVSATAPGYDPETVTVTVGPAEPTLVNFHLKRSGSSGGSSGGSSGDAHKSEVAHRFKDLGEENFKALVLIAFAQYLQQCPFEDHVKLVNEVTEFAKTCVADESAENCDKSLHTLFGDKLCTVATLRETYGEMADCCAKQEPERNECFLQHKDDNPNLPRLVRPEVDVMCTAFHDNEETFLKKYLYEIARRHPYFYAPELLFFAKRYKAAFTECCQAADKAACLLPKLDELRDEGKASSAKQRLKCASLQKFGERAFKAWAVARLSQRFPKAEFAEVSKLVTDLTKVHTECCHGDLLECADDRADLAKYICENQDSISSKLKECCEKPLLEKSHCIAEVENDEMPADLPSLAADFVESKDVCKNYAEAKDVFLGMFLYEYARRHPDYSVVLLLRLAKTYETTLEKCCAAADPHECYAKVFDEFKPLVEEPQNLIKQNCELFEQLGEYKFQNALLVRYTKKVPQVSTPTLVEVSRNLGKVGSKCCKHPEAKRMPCAEDYLSVVLNQLCVLHEKTPVSDRVTKCCTESLVNRRPCFSALEVDETYVPKEFNAETFTFHADICTLSEKERQIKKQTALVELVKHKPKATKEQLKAVMDDFAAFVEKCCKADDKETCFAEEGKKLVAASQAALGL

SEQ ID NO: 349 - protein, 995 aa, Artificial Sequence
  hCPN1 variant
VTFRHHRYDDLVRTLYKVQNECPGITRVYSIGRSVEGRHLYVLEFSDHPGIHEPLEPEVKYVGNMHGNEALGRELMLQLSEFLCEEFRNRNQRIVQLIQDTRIHILPSMNPDGYEVAAAQGPNKPGYLVGRNNANGVDLNRNFPDLNTYIYYNEKYGGPNHHLPLPDNWKSQVEPETRAVIRWMHSFNFVLSANLHGGAVVANYPYDKSFEHRVRGVRRTASTPTPDDKLFQKLAKVYSYAHGWMFQGWNCGDYFPDGITNGASWYSLSKGMQDFNYLHTNCFEITLELSCDKFPPEEALQREWLGNREALIQFLEQVHQGIKGMVLDENYNNLANAVISVSGINHDVTSGDHGDYFRLLLPGIYTVSATAPGYDPETVTVTVGPAEPTLVNFHLKRSGSSGGSSGGSSGDAHKSEVAHRFKDLGEENFKALVLIAFAQYLQQCPFEDHVKLVNEVTEFAKTCVADESAENCDKSLHTLFGDKLCTVATLRETYGEMADCCAKQEPERNECFLQHKDDNPNLPRLVRPEVDVMCTAFHDNEETFLKKYLYEIARRHPYFYAPELLFFAKRYKAAFTECCQAADKAACLLPKLDELRDEGKASSAKQRLKCASLQKFGERAFKAWAVARLSQRFPKAEFAEVSKLVTDLTKVHTECCHGDLLECADDRADLAKYICENQDSISSKLKECCEKPLLEKSHCIAEVENDEMPADLPSLAADFVESKDVCKNYAEAKDVFLGMFLYEYARRHPDYSVVLLLRLAKTYETTLEKCCAAADPHECYAKVFDEFKPLVEEPQNLIKQNCELFEQLGEYKFQNALLVRYTKKVPQVSTPTLVEVSRNLGKVGSKCCKHPEAKRMPCAEDYLSVVLNQLCVLHEKTPVSDRVTKCCTESLVNRRPCFSALEVDETYVPKEFNAETFTFHADICTLSEKERQIKKQTALVELVKHKPKATKEQLKAVMDDFAAFVEKCCKADDKETCFAEEGKKLVAASQAALGL

SEQ ID NO: 350 - protein, 995 aa, Artificial Sequence
  hCPN1 variant
VTFRHHRYDDLVRTLYKVQNECPGITRVYSIGRSVEGRHLYVLEFSDHPGIHEPLEPEVKYVGNMHGNEALGRELMLQLSEFLCEEFRNRNQRIVQLIQDTRIHILPSMNPDGYEVAAAQGPNKPGYLVGRNNANGVDLNRNFPDLNTYIYYNEKYGGPNHHLPLPDNWKSQVEPETRAVIRWMHSFNFVLSANLHGGAVVANYPYDKSFEHRVRGVRRTASTPTPDDKLFQKLAKVYSYAHGWMFQGWNCGDYFPDGITNGASWYSLSKGMQDFNYLHTNCFEITLELSCDKFPPEEELQAEWLGNREALIQFLEQVHQGIKGMVLDENYNNLANAVISVSGINHDVTSGDHGDYFRLLLPGIYTVSATAPGYDPETVTVTVGPAEPTLVNFHLKRSGSSGGSSGGSSGDAHKSEVAHRFKDLGEENFKALVLIAFAQYLQQCPFEDHVKLVNEVTEFAKTCVADESAENCDKSLHTLFGDKLCTVATLRETYGEMADCCAKQEPERNECFLQHKDDNPNLPRLVRPEVDVMCTAFHDNEETFLKKYLYEIARRHPYFYAPELLFFAKRYKAAFTECCQAADKAACLLPKLDELRDEGKASSAKQRLKCASLQKFGERAFKAWAVARLSQRFPKAEFAEVSKLVTDLTKVHTECCHGDLLECADDRADLAKYICENQDSISSKLKECCEKPLLEKSHCIAEVENDEMPADLPSLAADFVESKDVCKNYAEAKDVFLGMFLYEYARRHPDYSVVLLLRLAKTYETTLEKCCAAADPHECYAKVFDEFKPLVEEPQNLIKQNCELFEQLGEYKFQNALLVRYTKKVPQVSTPTLVEVSRNLGKVGSKCCKHPEAKRMPCAEDYLSVVLNQLCVLHEKTPVSDRVTKCCTESLVNRRPCFSALEVDETYVPKEFNAETFTFHADICTLSEKERQIKKQTALVELVKHKPKATKEQLKAVMDDFAAFVEKCCKADDKETCFAEEGKKLVAASQAALGL

SEQ ID NO: 351 - protein, 995 aa, Artificial Sequence
  hCPN1 variant
VTFRHHRYDDLVRTLYKVQNECPGITRVYSIGRSVEGRHLYVLEFSDHPGIHEPLEPEVKYVGNMHGNEALGRELMLQLSEFLCEEFRNRNQRIVQLIQDTRIHILPSMNPDGYEVAAAQGPNKPGYLVGRNNANGVDLNRNFPDLNTYIYYNEKYGGPNHHLPLPDNWKSQVEPETRAVIRWMHSFNFVLSANLHGGAVVANYPYDKSFEHRVRGVRRTASTPTPDDKLFQKLAKVYSYAHGWMFQGWNCGDYFPDGITNGASWYSLSKGMQDFNYLHTNCFEITLELSCDAFPPEEELQREWLGNREALIQFLEQVHQGIKGMVLDENYNNLANAVISVSGINHDVTSGDHGDYFRLLLPGIYTVSATAPGYDPETVTVTVGPAEPTLVNFHLKRSGSSGGSSGGSSGDAHKSEVAHRFKDLGEENFKALVLIAFAQYLQQCPFEDHVKLVNEVTEFAKTCVADESAENCDKSLHTLFGDKLCTVATLRETYGEMADCCAKQEPERNECFLQHKDDNPNLPRLVRPEVDVMCTAFHDNEETFLKKYLYEIARRHPYFYAPELLFFAKRYKAAFTECCQAADKAACLLPKLDELRDEGKASSAKQRLKCASLQKFGERAFKAWAVARLSQRFPKAEFAEVSKLVTDLTKVHTECCHGDLLECADDRADLAKYICENQDSISSKLKECCEKPLLEKSHCIAEVENDEMPADLPSLAADFVESKDVCKNYAEAKDVFLGMFLYEYARRHPDYSVVLLLRLAKTYETTLEKCCAAADPHECYAKVFDEFKPLVEEPQNLIKQNCELFEQLGEYKFQNALLVRYTKKVPQVSTPTLVEVSRNLGKVGSKCCKHPEAKRMPCAEDYLSVVLNQLCVLHEKTPVSDRVTKCCTESLVNRRPCFSALEVDETYVPKEFNAETFTFHADICTLSEKERQIKKQTALVELVKHKPKATKEQLKAVMDDFAAFVEKCCKADDKETCFAEEGKKLVAASQAALGL

SEQ ID NO: 352 - protein, 995 aa, Artificial Sequence
  hCPN1 variant
VTFRHHRYDDLVRTLYKVQNECPGITRVYSIGRSVEGRHLYVLEFSDHPGIHEPLEPEVKYVGNMHGNEALGRELMLQLSEFLCEEFRNRNQRIVQLIQDTRIHILPSMNPDGYEVAAAQGPNKPGYLVGRNNANGVDLNRNFPDLNTYIYYNEKYGGPNHHLPLPDNWKSQVEPETRAVIRWMHSFNFVLSANLHGGAVVANYPYDKSFEHRVRGVRRTASTPTPDDKLFQKLAKVYSYAHGWMFQGWNCGDYFPDGITNGASWYSLSKGMQDFNYLHTNCFEITLELSCDKFPAEEELQREWLGNREALIQFLEQVHQGIKGMVLDENYNNLANAVISVSGINHDVTSGDHGDYFRLLLPGIYTVSATAPGYDPETVTVTVGPAEPTLVNFHLKRSGSSGGSSGGSSGDAHKSEVAHRFKDLGEENFKALVLIAFAQYLQQCPFEDHVKLVNEVTEFAKTCVADESAENCDKSLHTLFGDKLCTVATLRETYGEMADCCAKQEPERNECFLQHKDDNPNLPRLVRPEVDVMCTAFHDNEETFLKKYLYEIARRHPYFYAPELLFFAKRYKAAFTECCQAADKAACLLPKLDELRDEGKASSAKQRLKCASLQKFGERAFKAWAVARLSQRFPKAEFAEVSKLVTDLTKVHTECCHGDLLECADDRADLAKYICENQDSISSKLKECCEKPLLEKSHCIAEVENDEMPADLPSLAADFVESKDVCKNYAEAKDVFLGMFLYEYARRHPDYSVVLLLRLAKTYETTLEKCCAAADPHECYAKVFDEFKPLVEEPQNLIKQNCELFEQLGEYKFQNALLVRYTKKVPQVSTPTLVEVSRNLGKVGSKCCKHPEAKRMPCAEDYLSVVLNQLCVLHEKTPVSDRVTKCCTESLVNRRPCFSALEVDETYVPKEFNAETFTFHADICTLSEKERQIKKQTALVELVKHKPKATKEQLKAVMDDFAAFVEKCCKADDKETCFAEEGKKLVAASQAALGL

SEQ ID NO: 353 - protein, 995 aa, Artificial Sequence
  hCPN1 variant
VTFRHHRYDDLVRTLYKVQNECPGITRVYSIGRSVEGRHLYVLEFSDHPGIHEPLEPEVKYVGNMHGNEALGRELMLQLSEFLCEEFRNRNQRIVQLIQDTRIHILPSMNPDGYEVAAAQGPNKPAYLVGRNNANGVDLNRNFPDLNTYIYYNEKYGGPNHHLPLPDNWKSQVEPETRAVIRWMHSFNFVLSANLHGGAVVANYPYDKSFEHRVRGVRRTASTPTPDDKLFQKLAKVYSYAHGWMFQGWNCGDYFPDGITNGASWYSLSKGMQDFNYLHTNCFEITLELSCDKFPPEEELQREWLGNREALIQFLEQVHQGIKGMVLDENYNNLANAVISVSGINHDVTSGDHGDYFRLLLPGIYTVSATAPGYDPETVTVTVGPAEPTLVNFHLKRSGSSGGSSGGSSGDAHKSEVAHRFKDLGEENFKALVLIAFAQYLQQCPFEDHVKLVNEVTEFAKTCVADESAENCDKSLHTLFGDKLCTVATLRETYGEMADCCAKQEPERNECFLQHKDDNPNLPRLVRPEVDVMCTAFHDNEETFLKKYLYEIARRHPYFYAPELLFFAKRYKAAFTECCQAADKAACLLPKLDELRDEGKASSAKQRLKCASLQKFGERAFKAWAVARLSQRFPKAEFAEVSKLVTDLTKVHTECCHGDLLECADDRADLAKYICENQDSISSKLKECCEKPLLEKSHCIAEVENDEMPADLPSLAADFVESKDVCKNYAEAKDVFLGMFLYEYARRHPDYSVVLLLRLAKTYETTLEKCCAAADPHECYAKVFDEFKPLVEEPQNLIKQNCELFEQLGEYKFQNALLVRYTKKVPQVSTPTLVEVSRNLGKVGSKCCKHPEAKRMPCAEDYLSVVLNQLCVLHEKTPVSDRVTKCCTESLVNRRPCFSALEVDETYVPKEFNAETFTFHADICTLSEKERQIKKQTALVELVKHKPKATKEQLKAVMDDFAAFVEKCCKADDKETCFAEEGKKLVAASQAALGL

SEQ ID NO: 354 - protein, 995 aa, Artificial Sequence
  hCPN1 variant
VTFRHHRYDDLVRTLYKVQNECPGITRVYSIGRSVEGRHLYVLEFSDHPGIHEPLEPEVKYVGNMHGNEALGRELMLQLSEFLCEEFRNRNQRIVQLIQDTRIHILPSMNPDGYEVAAAQGPNKPGALVGRNNANGVDLNRNFPDLNTYIYYNEKYGGPNHHLPLPDNWKSQVEPETRAVIRWMHSFNFVLSANLHGGAVVANYPYDKSFEHRVRGVRRTASTPTPDDKLFQKLAKVYSYAHGWMFQGWNCGDYFPDGITNGASWYSLSKGMQDFNYLHTNCFEITLELSCDKFPPEEELQREWLGNREALIQFLEQVHQGIKGMVLDENYNNLANAVISVSGINHDVTSGDHGDYFRLLLPGIYTVSATAPGYDPETVTVTVGPAEPTLVNFHLKRSGSSGGSSGGSSGDAHKSEVAHRFKDLGEENFKALVLIAFAQYLQQCPFEDHVKLVNEVTEFAKTCVADESAENCDKSLHTLFGDKLCTVATLRETYGEMADCCAKQEPERNECFLQHKDDNPNLPRLVRPEVDVMCTAFHDNEETFLKKYLYEIARRHPYFYAPELLFFAKRYKAAFTECCQAADKAACLLPKLDELRDEGKASSAKQRLKCASLQKFGERAFKAWAVARLSQRFPKAEFAEVSKLVTDLTKVHTECCHGDLLECADDRADLAKYICENQDSISSKLKECCEKPLLEKSHCIAEVENDEMPADLPSLAADFVESKDVCKNYAEAKDVFLGMFLYEYARRHPDYSVVLLLRLAKTYETTLEKCCAAADPHECYAKVFDEFKPLVEEPQNLIKQNCELFEQLGEYKFQNALLVRYTKKVPQVSTPTLVEVSRNLGKVGSKCCKHPEAKRMPCAEDYLSVVLNQLCVLHEKTPVSDRVTKCCTESLVNRRPCFSALEVDETYVPKEFNAETFTFHADICTLSEKERQIKKQTALVELVKHKPKATKEQLKAVMDDFAAFVEKCCKADDKETCFAEEGKKLVAASQAALGL

SEQ ID NO: 355 - protein, 995 aa, Artificial Sequence
  hCPN1 variant
VTFRHHRYDDLVRTLYKVQNECPGITRVYSIGRSVEGRHLYVLEFSDHPGIHEPLEPEVKYVGNMHGNEALGRELMLQLSEFLCEEFRNRNQRIVQLIQDTRIHILPSMNPDGYEVAAAQGPNKPGYAVGRNNANGVDLNRNFPDLNTYIYYNEKYGGPNHHLPLPDNWKSQVEPETRAVIRWMHSFNFVLSANLHGGAVVANYPYDKSFEHRVRGVRRTASTPTPDDKLFQKLAKVYSYAHGWMFQGWNCGDYFPDGITNGASWYSLSKGMQDFNYLHTNCFEITLELSCDKFPPEEELQREWLGNREALIQFLEQVHQGIKGMVLDENYNNLANAVISVSGINHDVTSGDHGDYFRLLLPGIYTVSATAPGYDPETVTVTVGPAEPTLVNFHLKRSGSSGGSSGGSSGDAHKSEVAHRFKDLGEENFKALVLIAFAQYLQQCPFEDHVKLVNEVTEFAKTCVADESAENCDKSLHTLFGDKLCTVATLRETYGEMADCCAKQEPERNECFLQHKDDNPNLPRLVRPEVDVMCTAFHDNEETFLKKYLYEIARRHPYFYAPELLFFAKRYKAAFTECCQAADKAACLLPKLDELRDEGKASSAKQRLKCASLQKFGERAFKAWAVARLSQRFPKAEFAEVSKLVTDLTKVHTECCHGDLLECADDRADLAKYICENQDSISSKLKECCEKPLLEKSHCIAEVENDEMPADLPSLAADFVESKDVCKNYAEAKDVFLGMFLYEYARRHPDYSVVLLLRLAKTYETTLEKCCAAADPHECYAKVFDEFKPLVEEPQNLIKQNCELFEQLGEYKFQNALLVRYTKKVPQVSTPTLVEVSRNLGKVGSKCCKHPEAKRMPCAEDYLSVVLNQLCVLHEKTPVSDRVTKCCTESLVNRRPCFSALEVDETYVPKEFNAETFTFHADICTLSEKERQIKKQTALVELVKHKPKATKEQLKAVMDDFAAFVEKCCKADDKETCFAEEGKKLVAASQAALGL

SEQ ID NO: 356 - protein, 995 aa, Artificial Sequence
  hCPN1 variant
VTFRHHRYDDLVRTLYKVQNECPGITRVYSIGRSVEGRHLYVLEFSDHPGIHEPLEPEVKYVGNMHGNEALGRELMLQLSEFLCEEFRNRNQRIVQLIQDTRIHILPSMNPDGYEVAAAQGPNKPGYLVGRNNANGVDLNRNFPDLNTYIYYNEKYGGPNHHLPLPDNWKSQVEPETRAVIRWMHSFNFVLSANLHGGAVVANYPYDKSFEHRVRGVRRTASTPTPDDKLFQKLAKVYSYAHGWMFLGWNCGDYFPDGITNGASWYSLSKGMQDFNYLHTNCFEITLELSCDKFPPEEELQREWLGNREALIQFLEQVHQGIKGMVLDENYNNLANAVISVSGINHDVTSGDHGDYFRLLLPGIYTVSATAPGYDPETVTVTVGPAEPTLVNFHLKRSGSSGGSSGGSSGDAHKSEVAHRFKDLGEENFKALVLIAFAQYLQQCPFEDHVKLVNEVTEFAKTCVADESAENCDKSLHTLFGDKLCTVATLRETYGEMADCCAKQEPERNECFLQHKDDNPNLPRLVRPEVDVMCTAFHDNEETFLKKYLYEIARRHPYFYAPELLFFAKRYKAAFTECCQAADKAACLLPKLDELRDEGKASSAKQRLKCASLQKFGERAFKAWAVARLSQRFPKAEFAEVSKLVTDLTKVHTECCHGDLLECADDRADLAKYICENQDSISSKLKECCEKPLLEKSHCIAEVENDEMPADLPSLAADFVESKDVCKNYAEAKDVFLGMFLYEYARRHPDYSVVLLLRLAKTYETTLEKCCAAADPHECYAKVFDEFKPLVEEPQNLIKQNCELFEQLGEYKFQNALLVRYTKKVPQVSTPTLVEVSRNLGKVGSKCCKHPEAKRMPCAEDYLSVVLNQLCVLHEKTPVSDRVTKCCTESLVNRRPCFSALEVDETYVPKEFNAETFTFHADICTLSEKERQIKKQTALVELVKHKPKATKEQLKAVMDDFAAFVEKCCKADDKETCFAEEGKKLVAASQAALGL

SEQ ID NO: 357 - protein, 995 aa, Artificial Sequence
  hCPN1 variant
VTFRHHRYDDLVRTLYKVQNECPGITRVYSIGRSVEGRHLYVLEFSDHPGIHEPLEPEVKYVGNMHGNEALGRELMLQLSEFLCEEFRNRNQRIVQLIQDTRIHILPSMNPDGYEVAAAQGPNKPGYLVGRNNANGVDLNRNFPDLNTYIYYNEKYGGPNHHLPLPDNWKSQVEPETRAVIRWMHSFNFVLSANLHGGAVVANYPYDKSFEHRVRGVRRTASTPTPDDKLFQKLAKVYSYAHGKMFLGWNCGDYFPDGITNGASWYSLSKGMQDFNYLHTNCFEITLELSCDKFPPEEELQREWLGNREALIQFLEQVHQGIKGMVLDENYNNLANAVISVSGINHDVTSGDHGDYFRLLLPGIYTVSATAPGYDPETVTVTVGPAEPTLVNFHLKRSGSSGGSSGGSSGDAHKSEVAHRFKDLGEENFKALVLIAFAQYLQQCPFEDHVKLVNEVTEFAKTCVADESAENCDKSLHTLFGDKLCTVATLRETYGEMADCCAKQEPERNECFLQHKDDNPNLPRLVRPEVDVMCTAFHDNEETFLKKYLYEIARRHPYFYAPELLFFAKRYKAAFTECCQAADKAACLLPKLDELRDEGKASSAKQRLKCASLQKFGERAFKAWAVARLSQRFPKAEFAEVSKLVTDLTKVHTECCHGDLLECADDRADLAKYICENQDSISSKLKECCEKPLLEKSHCIAEVENDEMPADLPSLAADFVESKDVCKNYAEAKDVFLGMFLYEYARRHPDYSVVLLLRLAKTYETTLEKCCAAADPHECYAKVFDEFKPLVEEPQNLIKQNCELFEQLGEYKFQNALLVRYTKKVPQVSTPTLVEVSRNLGKVGSKCCKHPEAKRMPCAEDYLSVVLNQLCVLHEKTPVSDRVTKCCTESLVNRRPCFSALEVDETYVPKEFNAETFTFHADICTLSEKERQIKKQTALVELVKHKPKATKEQLKAVMDDFAAFVEKCCKADDKETCFAEEGKKLVAASQAALGL

SEQ ID NO: 358 - protein, 995 aa, Artificial Sequence
  hCPN1 variant
VTFRHHRYDDLVRTLYKVQNECPGITRVYSIGRSVEGRHLYVLEFSDHPGIHEPLEPEVKYVGNMHGNEALGRELMLQLSEFLCEEFRNRNQRIVQLIQDTRIHILPSMNPDGYEVAAAQGPNKPGYLVGRNNANGVDLNRNFPDLNTYIYYNEKYGGPNHHLPLPDNWKSQVEPETRAVIRWMHSFNFVLSANLHGGAVVANYPYDKSFEHRVRGVRRTASTPTPDDKLFQKLAKVYSYAHGLMFMGYNCGDYFPDGITNGASWYSLSKGMQDFNYLHTNCFEITLELSCDKFPPEEELQREWLGNREALIQFLEQVHQGIKGMVLDENYNNLANAVISVSGINHDVTSGDHGDYFRLLLPGIYTVSATAPGYDPETVTVTVGPAEPTLVNFHLKRSGSSGGSSGGSSGDAHKSEVAHRFKDLGEENFKALVLIAFAQYLQQCPFEDHVKLVNEVTEFAKTCVADESAENCDKSLHTLFGDKLCTVATLRETYGEMADCCAKQEPERNECFLQHKDDNPNLPRLVRPEVDVMCTAFHDNEETFLKKYLYEIARRHPYFYAPELLFFAKRYKAAFTECCQAADKAACLLPKLDELRDEGKASSAKQRLKCASLQKFGERAFKAWAVARLSQRFPKAEFAEVSKLVTDLTKVHTECCHGDLLECADDRADLAKYICENQDSISSKLKECCEKPLLEKSHCIAEVENDEMPADLPSLAADFVESKDVCKNYAEAKDVFLGMFLYEYARRHPDYSVVLLLRLAKTYETTLEKCCAAADPHECYAKVFDEFKPLVEEPQNLIKQNCELFEQLGEYKFQNALLVRYTKKVPQVSTPTLVEVSRNLGKVGSKCCKHPEAKRMPCAEDYLSVVLNQLCVLHEKTPVSDRVTKCCTESLVNRRPCFSALEVDETYVPKEFNAETFTFHADICTLSEKERQIKKQTALVELVKHKPKATKEQLKAVMDDFAAFVEKCCKADDKETCFAEEGKKLVAASQAALGL

SEQ ID NO: 359 - protein, 995 aa, Artificial Sequence
  hCPN1 variant
VTFRHHRYDDLVRTLYKVQNECPGITRVYSIGRSVEGRHLYVLEFSDHPGIHEPLEPEVKYVGNMHGNEALGRELMLQLSEFLCEEFRNRNQRIVQLIQDTRIHILPSMNPDGYEVAAAQGPNKPGYLVGRNNANGVDLNRNFPDLNTYIYYNEKYGGPNHHLPLPDNWKSQVEPETRAVIRWMHSFNFVLSANLHGGAVVANYPYDKSFEHRVRGVRRTASTPTPDDKLFQKLAKVYSYAHGLMFLGYNCGDYFPDGITNGASWYSLSKGMQDFNYLHTNCFEITLELSCDKFPPEEELQREWLGNREALIQFLEQVHQGIKGMVLDENYNNLANAVISVSGINHDVTSGDHGDYFRLLLPGIYTVSATAPGYDPETVTVTVGPAEPTLVNFHLKRSGSSGGSSGGSSGDAHKSEVAHRFKDLGEENFKALVLIAFAQYLQQCPFEDHVKLVNEVTEFAKTCVADESAENCDKSLHTLFGDKLCTVATLRETYGEMADCCAKQEPERNECFLQHKDDNPNLPRLVRPEVDVMCTAFHDNEETFLKKYLYEIARRHPYFYAPELLFFAKRYKAAFTECCQAADKAACLLPKLDELRDEGKASSAKQRLKCASLQKFGERAFKAWAVARLSQRFPKAEFAEVSKLVTDLTKVHTECCHGDLLECADDRADLAKYICENQDSISSKLKECCEKPLLEKSHCIAEVENDEMPADLPSLAADFVESKDVCKNYAEAKDVFLGMFLYEYARRHPDYSVVLLLRLAKTYETTLEKCCAAADPHECYAKVFDEFKPLVEEPQNLIKQNCELFEQLGEYKFQNALLVRYTKKVPQVSTPTLVEVSRNLGKVGSKCCKHPEAKRMPCAEDYLSVVLNQLCVLHEKTPVSDRVTKCCTESLVNRRPCFSALEVDETYVPKEFNAETFTFHADICTLSEKERQIKKQTALVELVKHKPKATKEQLKAVMDDFAAFVEKCCKADDKETCFAEEGKKLVAASQAALGL

SEQ ID NO: 360 - protein, 995 aa, Artificial Sequence
  hCPN1 variant
VTFRHHRYDDLVRTLYKVQNECPGITRVYSIGRSVEGRHLYVLEFSDHPGIHEPLEPEVKYVGNMHGNEALGRELMLQLSEFLCEEFRNRNQRIVQLIQDTRIHILPSMNPDGYEVAAAQGPNKPGYLVGRNNANGVDLNRNFPDLNTYIYYNEKYGGPNHHLPLPDNWKSQVEPETRAVIRWMHSFNFVLSANLHGGAVVANYPYDKSFEHRVRGVRRTASTPTPDDKLFQKLAKVYSYAHGFMFTGWNCGDYFPDGITNGASWYSLSKGMQDFNYLHTNCFEITLELSCDKFPPEEELQREWLGNREALIQFLEQVHQGIKGMVLDENYNNLANAVISVSGINHDVTSGDHGDYFRLLLPGIYTVSATAPGYDPETVTVTVGPAEPTLVNFHLKRSGSSGGSSGGSSGDAHKSEVAHRFKDLGEENFKALVLIAFAQYLQQCPFEDHVKLVNEVTEFAKTCVADESAENCDKSLHTLFGDKLCTVATLRETYGEMADCCAKQEPERNECFLQHKDDNPNLPRLVRPEVDVMCTAFHDNEETFLKKYLYEIARRHPYFYAPELLFFAKRYKAAFTECCQAADKAACLLPKLDELRDEGKASSAKQRLKCASLQKFGERAFKAWAVARLSQRFPKAEFAEVSKLVTDLTKVHTECCHGDLLECADDRADLAKYICENQDSISSKLKECCEKPLLEKSHCIAEVENDEMPADLPSLAADFVESKDVCKNYAEAKDVFLGMFLYEYARRHPDYSVVLLLRLAKTYETTLEKCCAAADPHECYAKVFDEFKPLVEEPQNLIKQNCELFEQLGEYKFQNALLVRYTKKVPQVSTPTLVEVSRNLGKVGSKCCKHPEAKRMPCAEDYLSVVLNQLCVLHEKTPVSDRVTKCCTESLVNRRPCFSALEVDETYVPKEFNAETFTFHADICTLSEKERQIKKQTALVELVKHKPKATKEQLKAVMDDFAAFVEKCCKADDKETCFAEEGKKLVAASQAALGL

SEQ ID NO: 361 - protein, 995 aa, Artificial Sequence
  hCPN1 variant
VTFRHHRYDDLVRTLYKVQNECPGITRVYSIGRSVEGRHLYVLEFSDHPGIHEPLEPEVKYVGNMHGNEALGRELMLQLSEFLCEEFRNRNQRIVQLIQDTRIHILPSMNPDGYEVAAAQGPNKPGYLVGRNNANGVDLNRNFPDLNTYIYYNEKYGGPNHHLPLPDNWKSQVEPETRAVIRWMHSFNFVLSANLHGGAVVANYPYDKSFEHRVRGVRRTASTPTPDDKLFQKLAKVYSYAHGWMFMGWNCGDYFPDGITNGASWYSLSKGMQDFNYLHTNCFEITLELSCDKFPPEEELQREWLGNREALIQFLEQVHQGIKGMVLDENYNNLANAVISVSGINHDVTSGDHGDYFRLLLPGIYTVSATAPGYDPETVTVTVGPAEPTLVNFHLKRSGSSGGSSGGSSGDAHKSEVAHRFKDLGEENFKALVLIAFAQYLQQCPFEDHVKLVNEVTEFAKTCVADESAENCDKSLHTLFGDKLCTVATLRETYGEMADCCAKQEPERNECFLQHKDDNPNLPRLVRPEVDVMCTAFHDNEETFLKKYLYEIARRHPYFYAPELLFFAKRYKAAFTECCQAADKAACLLPKLDELRDEGKASSAKQRLKCASLQKFGERAFKAWAVARLSQRFPKAEFAEVSKLVTDLTKVHTECCHGDLLECADDRADLAKYICENQDSISSKLKECCEKPLLEKSHCIAEVENDEMPADLPSLAADFVESKDVCKNYAEAKDVFLGMFLYEYARRHPDYSVVLLLRLAKTYETTLEKCCAAADPHECYAKVFDEFKPLVEEPQNLIKQNCELFEQLGEYKFQNALLVRYTKKVPQVSTPTLVEVSRNLGKVGSKCCKHPEAKRMPCAEDYLSVVLNQLCVLHEKTPVSDRVTKCCTESLVNRRPCFSALEVDETYVPKEFNAETFTFHADICTLSEKERQIKKQTALVELVKHKPKATKEQLKAVMDDFAAFVEKCCKADDKETCFAEEGKKLVAASQAALGL

SEQ ID NO: 362 - protein, 995 aa, Artificial Sequence
  hCPN1 variant
VTFRHHRYDDLVRTLYKVQNECPGITRVYSIGRSVEGRHLYVLEFSDHPGIHEPLEPEVKYVGNMHGNEALGRELMLQLSEFLCEEFRNRNQRIVQLIQDTRIHILPSMNPDGYEVAAAQGPNKPGYLVGRNNANGVDLNRNFPDLNTYIYYNEKYGGPNHHLPLPDNWKSQVEPETRAVIRWMHSFNFVLSANLHGGAVVANYPYDKSFEHRVRGVRRTASTPTPDDKLFQKLAKVYSYAHGWMFQGYNCGDYFPDGITNGASWYSLSKGMQDFNYLHTNCFEITLELSCDKFPPEEELQREWLGNREALIQFLEQVHQGIKGMVLDENYNNLANAVISVSGINHDVTSGDHGDYFRLLLPGIYTVSATAPGYDPETVTVTVGPAEPTLVNFHLKRSGSSGGSSGGSSGDAHKSEVAHRFKDLGEENFKALVLIAFAQYLQQCPFEDHVKLVNEVTEFAKTCVADESAENCDKSLHTLFGDKLCTVATLRETYGEMADCCAKQEPERNECFLQHKDDNPNLPRLVRPEVDVMCTAFHDNEETFLKKYLYEIARRHPYFYAPELLFFAKRYKAAFTECCQAADKAACLLPKLDELRDEGKASSAKQRLKCASLQKFGERAFKAWAVARLSQRFPKAEFAEVSKLVTDLTKVHTECCHGDLLECADDRADLAKYICENQDSISSKLKECCEKPLLEKSHCIAEVENDEMPADLPSLAADFVESKDVCKNYAEAKDVFLGMFLYEYARRHPDYSVVLLLRLAKTYETTLEKCCAAADPHECYAKVFDEFKPLVEEPQNLIKQNCELFEQLGEYKFQNALLVRYTKKVPQVSTPTLVEVSRNLGKVGSKCCKHPEAKRMPCAEDYLSVVLNQLCVLHEKTPVSDRVTKCCTESLVNRRPCFSALEVDETYVPKEFNAETFTFHADICTLSEKERQIKKQTALVELVKHKPKATKEQLKAVMDDFAAFVEKCCKADDKETCFAEEGKKLVAASQAALGL

SEQ ID NO: 363 - protein, 995 aa, Artificial Sequence
  hCPN1 variant
VTFRHHRYDDLVRTLYKVQNECPGITRVYSIGRSVEGRHLYVLEFSDHPGIHEPLEPEVKYVGNMHGNEALGRELMLQLSEFLCEEFRNRNQRIVQLIQDTRIHILPSMNPDGYEVAAAQGPNKPGYLVGRNNANGVDLNRNFPDLNTYIYYNEKYGGPNHHLPLPDNWKSQVEPETRAVIRWMHSFNFVLSANLHGGAVVANYPYDKSFEHRVRGVRRTASTPTPDDKLFQKLAKVYSYAHGDMFLGWNCGDYFPDGITNGASWYSLSKGMQDFNYLHTNCFEITLELSCDKFPPEEELQREWLGNREALIQFLEQVHQGIKGMVLDENYNNLANAVISVSGINHDVTSGDHGDYFRLLLPGIYTVSATAPGYDPETVTVTVGPAEPTLVNFHLKRSGSSGGSSGGSSGDAHKSEVAHRFKDLGEENFKALVLIAFAQYLQQCPFEDHVKLVNEVTEFAKTCVADESAENCDKSLHTLFGDKLCTVATLRETYGEMADCCAKQEPERNECFLQHKDDNPNLPRLVRPEVDVMCTAFHDNEETFLKKYLYEIARRHPYFYAPELLFFAKRYKAAFTECCQAADKAACLLPKLDELRDEGKASSAKQRLKCASLQKFGERAFKAWAVARLSQRFPKAEFAEVSKLVTDLTKVHTECCHGDLLECADDRADLAKYICENQDSISSKLKECCEKPLLEKSHCIAEVENDEMPADLPSLAADFVESKDVCKNYAEAKDVFLGMFLYEYARRHPDYSVVLLLRLAKTYETTLEKCCAAADPHECYAKVFDEFKPLVEEPQNLIKQNCELFEQLGEYKFQNALLVRYTKKVPQVSTPTLVEVSRNLGKVGSKCCKHPEAKRMPCAEDYLSVVLNQLCVLHEKTPVSDRVTKCCTESLVNRRPCFSALEVDETYVPKEFNAETFTFHADICTLSEKERQIKKQTALVELVKHKPKATKEQLKAVMDDFAAFVEKCCKADDKETCFAEEGKKLVAASQAALGL

SEQ ID NO: 364 - protein, 995 aa, Artificial Sequence
  hCPN1 variant
VTFRHHRYDDLVRTLYKVQNECPGITRVYSIGRSVEGRHLYVLEFSDHPGIHEPLEPEVKYVGNMHGNEALGRELMLQLSEFLCEEFRNRNQRIVQLIQDTRIHILPSMNPDGYEVAAAQGPNKPGYLVGRNNANGVDLNRNFPDLNTYIYYNEKYGGPNHHLPLPDNWKSQVEPETRAVIRWMHSFNFVLSANLHGGAVVANYPYDKSFEHRVRGVRRTASTPTPDDKLFQKLAKVYSYAHGWMFQGWNCGDRFPDGITNGASWYSLSKGMQDFNYLHTNCFEITLELSCDKFPPEEELQREWLGNREALIQFLEQVHQGIKGMVLDENYNNLANAVISVSGINHDVTSGDHGDYFRLLLPGIYTVSATAPGYDPETVTVTVGPAEPTLVNFHLKRSGSSGGSSGGSSGDAHKSEVAHRFKDLGEENFKALVLIAFAQYLQQCPFEDHVKLVNEVTEFAKTCVADESAENCDKSLHTLFGDKLCTVATLRETYGEMADCCAKQEPERNECFLQHKDDNPNLPRLVRPEVDVMCTAFHDNEETFLKKYLYEIARRHPYFYAPELLFFAKRYKAAFTECCQAADKAACLLPKLDELRDEGKASSAKQRLKCASLQKFGERAFKAWAVARLSQRFPKAEFAEVSKLVTDLTKVHTECCHGDLLECADDRADLAKYICENQDSISSKLKECCEKPLLEKSHCIAEVENDEMPADLPSLAADFVESKDVCKNYAEAKDVFLGMFLYEYARRHPDYSVVLLLRLAKTYETTLEKCCAAADPHECYAKVFDEFKPLVEEPQNLIKQNCELFEQLGEYKFQNALLVRYTKKVPQVSTPTLVEVSRNLGKVGSKCCKHPEAKRMPCAEDYLSVVLNQLCVLHEKTPVSDRVTKCCTESLVNRRPCFSALEVDETYVPKEFNAETFTFHADICTLSEKERQIKKQTALVELVKHKPKATKEQLKAVMDDFAAFVEKCCKADDKETCFAEEGKKLVAASQAALGL

SEQ ID NO: 365 - protein, 995 aa, Artificial Sequence
  hCPN1 variant
VTFRHHRYDDLVRTLYKVQNECPGITRVYSIGRSVEGRHLYVLEFSDHPGIHEPLEPEVKYVGNMHGNEALGRELMLQLSEFLCEEFRNRNQRIVQLIQDTRIHILPSMNPDGYEVAAAQGPNKPGYLVGRNNANGVDLNRNFPDLNTYIYYNEKYGGPNHHLPLPDNWKSQVEPETRAVIRWMHSFNFVLSANLHGGAVVANYPYDKSFEHRVRGVRRTASTPTPDDKLFQKLAKVYSYAHGWMFLGWNCGDRFPDGITNGASWYSLSKGMQDFNYLHTNCFEITLELSCDKFPPEEELQREWLGNREALIQFLEQVHQGIKGMVLDENYNNLANAVISVSGINHDVTSGDHGDYFRLLLPGIYTVSATAPGYDPETVTVTVGPAEPTLVNFHLKRSGSSGGSSGGSSGDAHKSEVAHRFKDLGEENFKALVLIAFAQYLQQCPFEDHVKLVNEVTEFAKTCVADESAENCDKSLHTLFGDKLCTVATLRETYGEMADCCAKQEPERNECFLQHKDDNPNLPRLVRPEVDVMCTAFHDNEETFLKKYLYEIARRHPYFYAPELLFFAKRYKAAFTECCQAADKAACLLPKLDELRDEGKASSAKQRLKCASLQKFGERAFKAWAVARLSQRFPKAEFAEVSKLVTDLTKVHTECCHGDLLECADDRADLAKYICENQDSISSKLKECCEKPLLEKSHCIAEVENDEMPADLPSLAADFVESKDVCKNYAEAKDVFLGMFLYEYARRHPDYSVVLLLRLAKTYETTLEKCCAAADPHECYAKVFDEFKPLVEEPQNLIKQNCELFEQLGEYKFQNALLVRYTKKVPQVSTPTLVEVSRNLGKVGSKCCKHPEAKRMPCAEDYLSVVLNQLCVLHEKTPVSDRVTKCCTESLVNRRPCFSALEVDETYVPKEFNAETFTFHADICTLSEKERQIKKQTALVELVKHKPKATKEQLKAVMDDFAAFVEKCCKADDKETCFAEEGKKLVAASQAALGL

SEQ ID NO: 366 - protein, 995 aa, Artificial Sequence
  hCPN1 variant
VTFRHHRYDDLVRTLYKVQNECPGITRVYSIGRSVEGRHLYVLEFSDHPGIHEPLEPEVKYVGNMHGNEALGRELMLQLSEFLCEEFRNRNQRIVQLIQDTRIHILPSMNPDGYEVAAAQGPNKPGYLVGRNNANGVDLNRNFPDLNTYIYYNEKYGGPNHHLPLPDNWKSQVEPETRAVIRWMHSFNFVLSANLHGGAVVANYPYDKSFEHRVRGVRRTASTPTPDDKLFQKLAKVYSYAHGKMFLGWNCGTYFPDGITNGASWYSLSKGMQDFNYLHTNCFEITLELSCDKFPPEEELQREWLGNREALIQFLEQVHQGIKGMVLDENYNNLANAVISVSGINHDVTSGDHGDYFRLLLPGIYTVSATAPGYDPETVTVTVGPAEPTLVNFHLKRSGSSGGSSGGSSGDAHKSEVAHRFKDLGEENFKALVLIAFAQYLQQCPFEDHVKLVNEVTEFAKTCVADESAENCDKSLHTLFGDKLCTVATLRETYGEMADCCAKQEPERNECFLQHKDDNPNLPRLVRPEVDVMCTAFHDNEETFLKKYLYEIARRHPYFYAPELLFFAKRYKAAFTECCQAADKAACLLPKLDELRDEGKASSAKQRLKCASLQKFGERAFKAWAVARLSQRFPKAEFAEVSKLVTDLTKVHTECCHGDLLECADDRADLAKYICENQDSISSKLKECCEKPLLEKSHCIAEVENDEMPADLPSLAADFVESKDVCKNYAEAKDVFLGMFLYEYARRHPDYSVVLLLRLAKTYETTLEKCCAAADPHECYAKVFDEFKPLVEEPQNLIKQNCELFEQLGEYKFQNALLVRYTKKVPQVSTPTLVEVSRNLGKVGSKCCKHPEAKRMPCAEDYLSVVLNQLCVLHEKTPVSDRVTKCCTESLVNRRPCFSALEVDETYVPKEFNAETFTFHADICTLSEKERQIKKQTALVELVKHKPKATKEQLKAVMDDFAAFVEKCCKADDKETCFAEEGKKLVAASQAALGL

SEQ ID NO: 367 - protein, 995 aa, Artificial Sequence
  hCPN1 variant
VTFRHHRYDDLVRTLYKVQNECPGITRVYSIGRSVEGRHLYVLEFSDHPGIHEPLEPEVKYVGNMHGNEALGRELMLQLSEFLCEEFRNRNQRIVQLIQDTRIHILPSMNPDGYEVAAAQGPNKPGYLVGRNNANGVDLNRNFPDLNTYIYYNEKYGGPNHHLPLPDNWKSQVEPETRAVIRWMHSFNFVLSANLHGGAVVANYPYDKSFEHRVRGVRRTASTPTPDDKLFQKLAKVYSYAHGWMFLGWNCGTYFPDGITNGASWYSLSKGMQDFNYLHTNCFEITLELSCDKFPPEEELQREWLGNREALIQFLEQVHQGIKGMVLDENYNNLANAVISVSGINHDVTSGDHGDYFRLLLPGIYTVSATAPGYDPETVTVTVGPAEPTLVNFHLKRSGSSGGSSGGSSGDAHKSEVAHRFKDLGEENFKALVLIAFAQYLQQCPFEDHVKLVNEVTEFAKTCVADESAENCDKSLHTLFGDKLCTVATLRETYGEMADCCAKQEPERNECFLQHKDDNPNLPRLVRPEVDVMCTAFHDNEETFLKKYLYEIARRHPYFYAPELLFFAKRYKAAFTECCQAADKAACLLPKLDELRDEGKASSAKQRLKCASLQKFGERAFKAWAVARLSQRFPKAEFAEVSKLVTDLTKVHTECCHGDLLECADDRADLAKYICENQDSISSKLKECCEKPLLEKSHCIAEVENDEMPADLPSLAADFVESKDVCKNYAEAKDVFLGMFLYEYARRHPDYSVVLLLRLAKTYETTLEKCCAAADPHECYAKVFDEFKPLVEEPQNLIKQNCELFEQLGEYKFQNALLVRYTKKVPQVSTPTLVEVSRNLGKVGSKCCKHPEAKRMPCAEDYLSVVLNQLCVLHEKTPVSDRVTKCCTESLVNRRPCFSALEVDETYVPKEFNAETFTFHADICTLSEKERQIKKQTALVELVKHKPKATKEQLKAVMDDFAAFVEKCCKADDKETCFAEEGKKLVAASQAALGL

SEQ ID NO: 368 - protein, 995 aa, Artificial Sequence
  hCPN1 variant
VTFRHHRYDDLVRTLYKVQNECPGITRVYSIGRSVEGRHLYVLEFSDHPGIHEPLEPEVKYVGNMHGNEALGRELMLQLSEFLCEEFRNRNQRIVQLIQDTRIHILPSMNPDGYEVAAAQGPNKPGYLVGRNNANGVDLNRNFPDLNTYIYYNEKYGGPNHHLPLPDNWKSQVEPETRAVIRWMHSFNFVLSANLHGGAVVANYPYDKSFEHRVRGVRRTASTPTPDDKLFQKLAKVYSYAHGWMFQGWNCGDYFPDGITNGASWYSLSKGMQDFNYLHTNCFEITLELSCLKFPPEEELQREWLGNREALIQFLEQVHQGIKGMVLDENYNNLANAVISVSGINHDVTSGDHGDYFRLLLPGIYTVSATAPGYDPETVTVTVGPAEPTLVNFHLKRSGSSGGSSGGSSGDAHKSEVAHRFKDLGEENFKALVLIAFAQYLQQCPFEDHVKLVNEVTEFAKTCVADESAENCDKSLHTLFGDKLCTVATLRETYGEMADCCAKQEPERNECFLQHKDDNPNLPRLVRPEVDVMCTAFHDNEETFLKKYLYEIARRHPYFYAPELLFFAKRYKAAFTECCQAADKAACLLPKLDELRDEGKASSAKQRLKCASLQKFGERAFKAWAVARLSQRFPKAEFAEVSKLVTDLTKVHTECCHGDLLECADDRADLAKYICENQDSISSKLKECCEKPLLEKSHCIAEVENDEMPADLPSLAADFVESKDVCKNYAEAKDVFLGMFLYEYARRHPDYSVVLLLRLAKTYETTLEKCCAAADPHECYAKVFDEFKPLVEEPQNLIKQNCELFEQLGEYKFQNALLVRYTKKVPQVSTPTLVEVSRNLGKVGSKCCKHPEAKRMPCAEDYLSVVLNQLCVLHEKTPVSDRVTKCCTESLVNRRPCFSALEVDETYVPKEFNAETFTFHADICTLSEKERQIKKQTALVELVKHKPKATKEQLKAVMDDFAAFVEKCCKADDKETCFAEEGKKLVAASQAALGL

SEQ ID NO: 369 - protein, 995 aa, Artificial Sequence
  hCPN1 variant
VTFRHHRYDDLVRTLYKVQNECPGITRVYSIGRSVEGRHLYVLEFSDHPGIHEPLEPEVKYVGNMHGNEALGRELMLQLSEFLCEEFRNRNQRIVQLIQDTRIHILPSMNPDGYEVAAAQGPNKPGYLVGRNNANGVDLNRNFPDLNTYIYYNEKYGGPNHHLPLPDNWKSQVEPETRAVIRWMHSFNFVLSANLHGGAVVANYPYDKSFEHRVRGVRRTASTPTPDDKLFQKLAKVYSYAHGWMFQGWNCGDYFPDGITNGASWYSLSKGMQDFNYLHTNCFEITLELSCDKFPPEEELQMEWLGNREALIQFLEQVHQGIKGMVLDENYNNLANAVISVSGINHDVTSGDHGDYFRLLLPGIYTVSATAPGYDPETVTVTVGPAEPTLVNFHLKRSGSSGGSSGGSSGDAHKSEVAHRFKDLGEENFKALVLIAFAQYLQQCPFEDHVKLVNEVTEFAKTCVADESAENCDKSLHTLFGDKLCTVATLRETYGEMADCCAKQEPERNECFLQHKDDNPNLPRLVRPEVDVMCTAFHDNEETFLKKYLYEIARRHPYFYAPELLFFAKRYKAAFTECCQAADKAACLLPKLDELRDEGKASSAKQRLKCASLQKFGERAFKAWAVARLSQRFPKAEFAEVSKLVTDLTKVHTECCHGDLLECADDRADLAKYICENQDSISSKLKECCEKPLLEKSHCIAEVENDEMPADLPSLAADFVESKDVCKNYAEAKDVFLGMFLYEYARRHPDYSVVLLLRLAKTYETTLEKCCAAADPHECYAKVFDEFKPLVEEPQNLIKQNCELFEQLGEYKFQNALLVRYTKKVPQVSTPTLVEVSRNLGKVGSKCCKHPEAKRMPCAEDYLSVVLNQLCVLHEKTPVSDRVTKCCTESLVNRRPCFSALEVDETYVPKEFNAETFTFHADICTLSEKERQIKKQTALVELVKHKPKATKEQLKAVMDDFAAFVEKCCKADDKETCFAEEGKKLVAASQAALGL

SEQ ID NO: 370 - protein, 995 aa, Artificial Sequence
  hCPN1 variant
VTFRHHRYDDLVRTLYKVQNECPGITRVYSIGRSVEGRHLYVLEFSDHPGIHEPLEPEVKYVGNMHGNEALGRELMLQLSEFLCEEFRNRNQRIVQLIQDTRIHILPSMNPDGYEVAAAQGPNKPGYLVGRNNANGVDLNRNFPDLNTYIYYNEKYGGPNHHLPLPDNWKSQVEPETRAVIRWMHSFNFVLSANLHGGAVVANYPYDKSFEHRVRGVRRTASTPTPDDKLFQKLAKVYSYAHGWMFQGWNCGDYFPDGITNGASWYSLSKGMQDFNYLHTNCFEITLELSCDKFPPEEELQWEWLGNREALIQFLEQVHQGIKGMVLDENYNNLANAVISVSGINHDVTSGDHGDYFRLLLPGIYTVSATAPGYDPETVTVTVGPAEPTLVNFHLKRSGSSGGSSGGSSGDAHKSEVAHRFKDLGEENFKALVLIAFAQYLQQCPFEDHVKLVNEVTEFAKTCVADESAENCDKSLHTLFGDKLCTVATLRETYGEMADCCAKQEPERNECFLQHKDDNPNLPRLVRPEVDVMCTAFHDNEETFLKKYLYEIARRHPYFYAPELLFFAKRYKAAFTECCQAADKAACLLPKLDELRDEGKASSAKQRLKCASLQKFGERAFKAWAVARLSQRFPKAEFAEVSKLVTDLTKVHTECCHGDLLECADDRADLAKYICENQDSISSKLKECCEKPLLEKSHCIAEVENDEMPADLPSLAADFVESKDVCKNYAEAKDVFLGMFLYEYARRHPDYSVVLLLRLAKTYETTLEKCCAAADPHECYAKVFDEFKPLVEEPQNLIKQNCELFEQLGEYKFQNALLVRYTKKVPQVSTPTLVEVSRNLGKVGSKCCKHPEAKRMPCAEDYLSVVLNQLCVLHEKTPVSDRVTKCCTESLVNRRPCFSALEVDETYVPKEFNAETFTFHADICTLSEKERQIKKQTALVELVKHKPKATKEQLKAVMDDFAAFVEKCCKADDKETCFAEEGKKLVAASQAALGL

SEQ ID NO: 371 - protein, 995 aa, Artificial Sequence
  hCPN1 variant
VTFRHHRYDDLVRTLYKVQNECPGITRVYSIGRSVEGRHLYVLEFSDHPGIHEPLEPEVKYVGNMHGNEALGRELMLQLSEFLCEEFRNRNQRIVQLIQDTRIHILPSMNPDGYEVAAAQGPNKPGYLVGRNNANGVDLNRNFPDLNTYIYYNEKYGGPNHHLPLPDNWKSQVEPETRAVIRWMHSFNFVLSANLHGGAVVANYPYDKSFEHRVRGVRRTASTPTPDDKLFQKLAKVYSYAHGWMFQGWNCGDYFPDGITNGASWYSLSKGMQDFNYLHTNCFEITLELSCDKFPPEEELQKEWLGNREALIQFLEQVHQGIKGMVLDENYNNLANAVISVSGINHDVTSGDHGDYFRLLLPGIYTVSATAPGYDPETVTVTVGPAEPTLVNFHLKRSGSSGGSSGGSSGDAHKSEVAHRFKDLGEENFKALVLIAFAQYLQQCPFEDHVKLVNEVTEFAKTCVADESAENCDKSLHTLFGDKLCTVATLRETYGEMADCCAKQEPERNECFLQHKDDNPNLPRLVRPEVDVMCTAFHDNEETFLKKYLYEIARRHPYFYAPELLFFAKRYKAAFTECCQAADKAACLLPKLDELRDEGKASSAKQRLKCASLQKFGERAFKAWAVARLSQRFPKAEFAEVSKLVTDLTKVHTECCHGDLLECADDRADLAKYICENQDSISSKLKECCEKPLLEKSHCIAEVENDEMPADLPSLAADFVESKDVCKNYAEAKDVFLGMFLYEYARRHPDYSVVLLLRLAKTYETTLEKCCAAADPHECYAKVFDEFKPLVEEPQNLIKQNCELFEQLGEYKFQNALLVRYTKKVPQVSTPTLVEVSRNLGKVGSKCCKHPEAKRMPCAEDYLSVVLNQLCVLHEKTPVSDRVTKCCTESLVNRRPCFSALEVDETYVPKEFNAETFTFHADICTLSEKERQIKKQTALVELVKHKPKATKEQLKAVMDDFAAFVEKCCKADDKETCFAEEGKKLVAASQAALGL

SEQ ID NO: 372 - protein, 995 aa, Artificial Sequence
  hCPN1 variant
VTFRHHRYDDLVRTLYKVQNECPGITRVYSIGRSVEGRHLYVLEFSDHPGIHEPLEPEVKYVGNMHGNEALGRELMLQLSEFLCEEFRNRNQRIVQLIQDTRIHILPSMNPDGYEVAAAQGPNKPGYLVGRNNANGVDLNRNFPDLNTYIYYNEKYGGPNHHLPLPDNWKSQVEPETRAVIRWMHSFNFVLSANLHGGAVVANYPYDKSFEHRVRGVRRTASTPTPDDKLFQKLAKVYSYAHGWMFQGWNCGDYFPDGITNGASWYSLSKGMQDFNYLHTNCFEITLELSCDKFPPEEELQLEWLGNREALIQFLEQVHQGIKGMVLDENYNNLANAVISVSGINHDVTSGDHGDYFRLLLPGIYTVSATAPGYDPETVTVTVGPAEPTLVNFHLKRSGSSGGSSGGSSGDAHKSEVAHRFKDLGEENFKALVLIAFAQYLQQCPFEDHVKLVNEVTEFAKTCVADESAENCDKSLHTLFGDKLCTVATLRETYGEMADCCAKQEPERNECFLQHKDDNPNLPRLVRPEVDVMCTAFHDNEETFLKKYLYEIARRHPYFYAPELLFFAKRYKAAFTECCQAADKAACLLPKLDELRDEGKASSAKQRLKCASLQKFGERAFKAWAVARLSQRFPKAEFAEVSKLVTDLTKVHTECCHGDLLECADDRADLAKYICENQDSISSKLKECCEKPLLEKSHCIAEVENDEMPADLPSLAADFVESKDVCKNYAEAKDVFLGMFLYEYARRHPDYSVVLLLRLAKTYETTLEKCCAAADPHECYAKVFDEFKPLVEEPQNLIKQNCELFEQLGEYKFQNALLVRYTKKVPQVSTPTLVEVSRNLGKVGSKCCKHPEAKRMPCAEDYLSVVLNQLCVLHEKTPVSDRVTKCCTESLVNRRPCFSALEVDETYVPKEFNAETFTFHADICTLSEKERQIKKQTALVELVKHKPKATKEQLKAVMDDFAAFVEKCCKADDKETCFAEEGKKLVAASQAALGL

SEQ ID NO: 373 - protein, 995 aa, Artificial Sequence
  hCPN1 variant
VTFRHHRYDDLVRTLYKVQNECPGITRVYSIGRSVEGRHLYVLEFSDHPGIHEPLEPEVKYVGNMHGNEALGRELMLQLSEFLCEEFRNRNQRIVQLIQDTRIHILPSMNPDGYEVAAAQGPNKPGYLVGRNNANGVDLNRNFPDLNTYIYYNEKYGGPNHHLPLPDNWKSQVEPETRAVIRWMHSFNFVLSANLHGGAVVANYPYDKSFEHRVRGVRRTASTPTPDDKLFQKLAKVYSYAHGWMFQGWNCGDYFPDGITNGASWYSLSKGMQDFNYLHTNCFEITLELSCDKFPPEEELQQEWLGNREALIQFLEQVHQGIKGMVLDENYNNLANAVISVSGINHDVTSGDHGDYFRLLLPGIYTVSATAPGYDPETVTVTVGPAEPTLVNFHLKRSGSSGGSSGGSSGDAHKSEVAHRFKDLGEENFKALVLIAFAQYLQQCPFEDHVKLVNEVTEFAKTCVADESAENCDKSLHTLFGDKLCTVATLRETYGEMADCCAKQEPERNECFLQHKDDNPNLPRLVRPEVDVMCTAFHDNEETFLKKYLYEIARRHPYFYAPELLFFAKRYKAAFTECCQAADKAACLLPKLDELRDEGKASSAKQRLKCASLQKFGERAFKAWAVARLSQRFPKAEFAEVSKLVTDLTKVHTECCHGDLLECADDRADLAKYICENQDSISSKLKECCEKPLLEKSHCIAEVENDEMPADLPSLAADFVESKDVCKNYAEAKDVFLGMFLYEYARRHPDYSVVLLLRLAKTYETTLEKCCAAADPHECYAKVFDEFKPLVEEPQNLIKQNCELFEQLGEYKFQNALLVRYTKKVPQVSTPTLVEVSRNLGKVGSKCCKHPEAKRMPCAEDYLSVVLNQLCVLHEKTPVSDRVTKCCTESLVNRRPCFSALEVDETYVPKEFNAETFTFHADICTLSEKERQIKKQTALVELVKHKPKATKEQLKAVMDDFAAFVEKCCKADDKETCFAEEGKKLVAASQAALGL

SEQ ID NO: 374 - protein, 995 aa, Artificial Sequence
  hCPN1 variant
VTFRHHRYDDLVRTLYKVQNECPGITRVYSIGRSVEGRHLYVLEFSDHPGIHEPLEPEVKYVGNMHGNEALGRELMLQLSEFLCEEFRNRNQRIVQLIQDTRIHILPSMNPDGYEVAAAQGPNKPGYLVGRNNANGVDLNRNFPDLNTYIYYNEKYGGPNHHLPLPDNWKSQVEPETRAVIRWMHSFNFVLSANLHGGAVVANYPYDKSFEHRVRGVRRTASTPTPDDKLFQKLAKVYSYAHGWMFQGWNCGDYFPDGITNGASWYSLSKGMQDFNYLHTNCFEITLELSCDPFPPEEELQMEWLGNREALIQFLEQVHQGIKGMVLDENYNNLANAVISVSGINHDVTSGDHGDYFRLLLPGIYTVSATAPGYDPETVTVTVGPAEPTLVNFHLKRSGSSGGSSGGSSGDAHKSEVAHRFKDLGEENFKALVLIAFAQYLQQCPFEDHVKLVNEVTEFAKTCVADESAENCDKSLHTLFGDKLCTVATLRETYGEMADCCAKQEPERNECFLQHKDDNPNLPRLVRPEVDVMCTAFHDNEETFLKKYLYEIARRHPYFYAPELLFFAKRYKAAFTECCQAADKAACLLPKLDELRDEGKASSAKQRLKCASLQKFGERAFKAWAVARLSQRFPKAEFAEVSKLVTDLTKVHTECCHGDLLECADDRADLAKYICENQDSISSKLKECCEKPLLEKSHCIAEVENDEMPADLPSLAADFVESKDVCKNYAEAKDVFLGMFLYEYARRHPDYSVVLLLRLAKTYETTLEKCCAAADPHECYAKVFDEFKPLVEEPQNLIKQNCELFEQLGEYKFQNALLVRYTKKVPQVSTPTLVEVSRNLGKVGSKCCKHPEAKRMPCAEDYLSVVLNQLCVLHEKTPVSDRVTKCCTESLVNRRPCFSALEVDETYVPKEFNAETFTFHADICTLSEKERQIKKQTALVELVKHKPKATKEQLKAVMDDFAAFVEKCCKADDKETCFAEEGKKLVAASQAALGL

SEQ ID NO: 375 - protein, 995 aa, Artificial Sequence
  hCPN1 variant
VTFRHHRYDDLVRTLYKVQNECPGITRVYSIGRSVEGRHLYVLEFSDHPGIHEPLEPEVKYVGNMHGNEALGRELMLQLSEFLCEEFRNRNQRIVQLIQDTRIHILPSMNPDGYEVAAAQGPNKPGYLVGRNNANGVDLNRNFPDLNTYIYYNEKYGGPNHHLPLPDNWKSQVEPETRAVIRWMHSFNFVLSANLHGGAVVANYPYDKSFEHRVRGVRRTASTPTPDDKLFQKLAKVYSYAHGWMFQGWNCGDYFPDGITNGASWYSLSKGMQDFNYLHTNCFEITLELSCLAFPPEEELQREWLGNREALIQFLEQVHQGIKGMVLDENYNNLANAVISVSGINHDVTSGDHGDYFRLLLPGIYTVSATAPGYDPETVTVTVGPAEPTLVNFHLKRSGSSGGSSGGSSGDAHKSEVAHRFKDLGEENFKALVLIAFAQYLQQCPFEDHVKLVNEVTEFAKTCVADESAENCDKSLHTLFGDKLCTVATLRETYGEMADCCAKQEPERNECFLQHKDDNPNLPRLVRPEVDVMCTAFHDNEETFLKKYLYEIARRHPYFYAPELLFFAKRYKAAFTECCQAADKAACLLPKLDELRDEGKASSAKQRLKCASLQKFGERAFKAWAVARLSQRFPKAEFAEVSKLVTDLTKVHTECCHGDLLECADDRADLAKYICENQDSISSKLKECCEKPLLEKSHCIAEVENDEMPADLPSLAADFVESKDVCKNYAEAKDVFLGMFLYEYARRHPDYSVVLLLRLAKTYETTLEKCCAAADPHECYAKVFDEFKPLVEEPQNLIKQNCELFEQLGEYKFQNALLVRYTKKVPQVSTPTLVEVSRNLGKVGSKCCKHPEAKRMPCAEDYLSVVLNQLCVLHEKTPVSDRVTKCCTESLVNRRPCFSALEVDETYVPKEFNAETFTFHADICTLSEKERQIKKQTALVELVKHKPKATKEQLKAVMDDFAAFVEKCCKADDKETCFAEEGKKLVAASQAALGL

SEQ ID NO: 376 - protein, 995 aa, Artificial Sequence
  hCPN1 variant
VTFRHHRYDDLVRTLYKVQNECPGITRVYSIGRSVEGRHLYVLEFSDHPGIHEPLEPEVKYVGNMHGNEALGRELMLQLSEFLCEEFRNRNQRIVQLIQDTRIHILPSMNPDGYEVAAAQGPNKPGYLVGRNNANGVDLNRNFPDLNTYIYYNEKYGGPNHHLPLPDNWKSQVEPETRAVIRWMHSFNFVLSANLHGGAVVANYPYDKSFEHRVRGVRRTASTPTPDDKLFQKLAKVYSYAHGWMFQGWNCGDYFPDGITNGASWYSLSKGMQDFNYLHTNCFEITLELSCDYFPPEEELQREWLGNREALIQFLEQVHQGIKGMVLDENYNNLANAVISVSGINHDVTSGDHGDYFRLLLPGIYTVSATAPGYDPETVTVTVGPAEPTLVNFHLKRSGSSGGSSGGSSGDAHKSEVAHRFKDLGEENFKALVLIAFAQYLQQCPFEDHVKLVNEVTEFAKTCVADESAENCDKSLHTLFGDKLCTVATLRETYGEMADCCAKQEPERNECFLQHKDDNPNLPRLVRPEVDVMCTAFHDNEETFLKKYLYEIARRHPYFYAPELLFFAKRYKAAFTECCQAADKAACLLPKLDELRDEGKASSAKQRLKCASLQKFGERAFKAWAVARLSQRFPKAEFAEVSKLVTDLTKVHTECCHGDLLECADDRADLAKYICENQDSISSKLKECCEKPLLEKSHCIAEVENDEMPADLPSLAADFVESKDVCKNYAEAKDVFLGMFLYEYARRHPDYSVVLLLRLAKTYETTLEKCCAAADPHECYAKVFDEFKPLVEEPQNLIKQNCELFEQLGEYKFQNALLVRYTKKVPQVSTPTLVEVSRNLGKVGSKCCKHPEAKRMPCAEDYLSVVLNQLCVLHEKTPVSDRVTKCCTESLVNRRPCFSALEVDETYVPKEFNAETFTFHADICTLSEKERQIKKQTALVELVKHKPKATKEQLKAVMDDFAAFVEKCCKADDKETCFAEEGKKLVAASQAALGL

SEQ ID NO: 377 - protein, 995 aa, Artificial Sequence
  hCPN1 variant
VTFRHHRYDDLVRTLYKVQNECPGITRVYSIGRSVEGRHLYVLEFSDHPGIHEPLEPEVKYVGNMHGNEALGRELMLQLSEFLCEEFRNRNQRIVQLIQDTRIHILPSMNPDGYEVAAAQGPNKPGYLVGRNNANGVDLNRNFPDLNTYIYYNEKYGGPNHHLPLPDNWKSQVEPETRAVIRWMHSFNFVLSANLHGGAVVANYPYDKSFEHRVRGVRRTASTPTPDDKLFQKLAKVYSYAHGWMFQGWNCGDYFPDGITNGASWYSLSKGMQDFNYLHTNCFEITLELSCDYFPDEEELQREWLGNREALIQFLEQVHQGIKGMVLDENYNNLANAVISVSGINHDVTSGDHGDYFRLLLPGIYTVSATAPGYDPETVTVTVGPAEPTLVNFHLKRSGSSGGSSGGSSGDAHKSEVAHRFKDLGEENFKALVLIAFAQYLQQCPFEDHVKLVNEVTEFAKTCVADESAENCDKSLHTLFGDKLCTVATLRETYGEMADCCAKQEPERNECFLQHKDDNPNLPRLVRPEVDVMCTAFHDNEETFLKKYLYEIARRHPYFYAPELLFFAKRYKAAFTECCQAADKAACLLPKLDELRDEGKASSAKQRLKCASLQKFGERAFKAWAVARLSQRFPKAEFAEVSKLVTDLTKVHTECCHGDLLECADDRADLAKYICENQDSISSKLKECCEKPLLEKSHCIAEVENDEMPADLPSLAADFVESKDVCKNYAEAKDVFLGMFLYEYARRHPDYSVVLLLRLAKTYETTLEKCCAAADPHECYAKVFDEFKPLVEEPQNLIKQNCELFEQLGEYKFQNALLVRYTKKVPQVSTPTLVEVSRNLGKVGSKCCKHPEAKRMPCAEDYLSVVLNQLCVLHEKTPVSDRVTKCCTESLVNRRPCFSALEVDETYVPKEFNAETFTFHADICTLSEKERQIKKQTALVELVKHKPKATKEQLKAVMDDFAAFVEKCCKADDKETCFAEEGKKLVAASQAALGL

SEQ ID NO: 378 - protein, 995 aa, Artificial Sequence
  hCPN1 variant
VTFRHHRYDDLVRTLYKVQNECPGITRVYSIGRSVEGRHLYVLEFSDHPGIHEPLEPEVKYVGNMHGNEALGRELMLQLSEFLCEEFRNRNQRIVQLIQDTRIHILPSMNPDGYEVAAAQGPNKPGYLVGRNNANGVDLNRNFPDLNTYIYYNEKYGGPNHHLPLPDNWKSQVEPETRAVIRWMHSFNFVLSANLHGGAVVANYPYDKSFEHRVRGVRRTASTPTPDDKLFQKLAKVYSYAHGWMFQGWNCGDYFPDGITNGASWYSLSKGMQDFNYLHTNCFEITLELSCDPFPPEEELQIEWLGNREALIQFLEQVHQGIKGMVLDENYNNLANAVISVSGINHDVTSGDHGDYFRLLLPGIYTVSATAPGYDPETVTVTVGPAEPTLVNFHLKRSGSSGGSSGGSSGDAHKSEVAHRFKDLGEENFKALVLIAFAQYLQQCPFEDHVKLVNEVTEFAKTCVADESAENCDKSLHTLFGDKLCTVATLRETYGEMADCCAKQEPERNECFLQHKDDNPNLPRLVRPEVDVMCTAFHDNEETFLKKYLYEIARRHPYFYAPELLFFAKRYKAAFTECCQAADKAACLLPKLDELRDEGKASSAKQRLKCASLQKFGERAFKAWAVARLSQRFPKAEFAEVSKLVTDLTKVHTECCHGDLLECADDRADLAKYICENQDSISSKLKECCEKPLLEKSHCIAEVENDEMPADLPSLAADFVESKDVCKNYAEAKDVFLGMFLYEYARRHPDYSVVLLLRLAKTYETTLEKCCAAADPHECYAKVFDEFKPLVEEPQNLIKQNCELFEQLGEYKFQNALLVRYTKKVPQVSTPTLVEVSRNLGKVGSKCCKHPEAKRMPCAEDYLSVVLNQLCVLHEKTPVSDRVTKCCTESLVNRRPCFSALEVDETYVPKEFNAETFTFHADICTLSEKERQIKKQTALVELVKHKPKATKEQLKAVMDDFAAFVEKCCKADDKETCFAEEGKKLVAASQAALGL

SEQ ID NO: 379 - protein, 995 aa, Artificial Sequence
  hCPN1 variant
VTFRHHRYDDLVRTLYKVQNECPGITRVYSIGRSVEGRHLYVLEFSDHPGIHEPLEPEVKYVGNMHGNEALGRELMLQLSEFLCEEFRNRNQRIVQLIQDTRIHILPSMNPDGYEVAAAQGPNKPGYLVGRNNANGVDLNRNFPDLNTYIYYNEKYGGPNHHLPLPDNWKSQVEPETRAVIRWMHSFNFVLSANLHGGAVVANYPYDKSFEHRVRGVRRTASTPTPDDKLFQKLAKVYSYAHGWMFQGWNCGDYFPDGITNGASWYSLSKGMQDFNYLHTNCFEITLELSCDMFPDEEELQREWLGNREALIQFLEQVHQGIKGMVLDENYNNLANAVISVSGINHDVTSGDHGDYFRLLLPGIYTVSATAPGYDPETVTVTVGPAEPTLVNFHLKRSGSSGGSSGGSSGDAHKSEVAHRFKDLGEENFKALVLIAFAQYLQQCPFEDHVKLVNEVTEFAKTCVADESAENCDKSLHTLFGDKLCTVATLRETYGEMADCCAKQEPERNECFLQHKDDNPNLPRLVRPEVDVMCTAFHDNEETFLKKYLYEIARRHPYFYAPELLFFAKRYKAAFTECCQAADKAACLLPKLDELRDEGKASSAKQRLKCASLQKFGERAFKAWAVARLSQRFPKAEFAEVSKLVTDLTKVHTECCHGDLLECADDRADLAKYICENQDSISSKLKECCEKPLLEKSHCIAEVENDEMPADLPSLAADFVESKDVCKNYAEAKDVFLGMFLYEYARRHPDYSVVLLLRLAKTYETTLEKCCAAADPHECYAKVFDEFKPLVEEPQNLIKQNCELFEQLGEYKFQNALLVRYTKKVPQVSTPTLVEVSRNLGKVGSKCCKHPEAKRMPCAEDYLSVVLNQLCVLHEKTPVSDRVTKCCTESLVNRRPCFSALEVDETYVPKEFNAETFTFHADICTLSEKERQIKKQTALVELVKHKPKATKEQLKAVMDDFAAFVEKCCKADDKETCFAEEGKKLVAASQAALGL

SEQ ID NO: 380 - protein, 995 aa, Artificial Sequence
  hCPN1 variant
VTFRHHRYDDLVRTLYKVQNECPGITRVYSIGRSVEGRHLYVLEFSDHPGIHEPLEPEVKYVGNMHGNEALGRELMLQLSEFLCEEFRNRNQRIVQLIQDTRIHILPSMNPDGYEVAAAQGPNKPGLLVGRNNANGVDLNRNFPDLNTYIYYNEKYGGPNHHLPLPDNWKSQVEPETRAVIRWMHSFNFVLSANLHGGAVVANYPYDKSFEHRVRGVRRTASTPTPDDKLFQKLAKVYSYAHGWMFQGWNCGDYFPDGITNGASWYSLSKGMQDFNYLHTNCFEITLELSCDPFPPEEELQREWLGNREALIQFLEQVHQGIKGMVLDENYNNLANAVISVSGINHDVTSGDHGDYFRLLLPGIYTVSATAPGYDPETVTVTVGPAEPTLVNFHLKRSGSSGGSSGGSSGDAHKSEVAHRFKDLGEENFKALVLIAFAQYLQQCPFEDHVKLVNEVTEFAKTCVADESAENCDKSLHTLFGDKLCTVATLRETYGEMADCCAKQEPERNECFLQHKDDNPNLPRLVRPEVDVMCTAFHDNEETFLKKYLYEIARRHPYFYAPELLFFAKRYKAAFTECCQAADKAACLLPKLDELRDEGKASSAKQRLKCASLQKFGERAFKAWAVARLSQRFPKAEFAEVSKLVTDLTKVHTECCHGDLLECADDRADLAKYICENQDSISSKLKECCEKPLLEKSHCIAEVENDEMPADLPSLAADFVESKDVCKNYAEAKDVFLGMFLYEYARRHPDYSVVLLLRLAKTYETTLEKCCAAADPHECYAKVFDEFKPLVEEPQNLIKQNCELFEQLGEYKFQNALLVRYTKKVPQVSTPTLVEVSRNLGKVGSKCCKHPEAKRMPCAEDYLSVVLNQLCVLHEKTPVSDRVTKCCTESLVNRRPCFSALEVDETYVPKEFNAETFTFHADICTLSEKERQIKKQTALVELVKHKPKATKEQLKAVMDDFAAFVEKCCKADDKETCFAEEGKKLVAASQAALGL

SEQ ID NO: 381 - protein, 995 aa, Artificial Sequence
  hCPN1 variant
VTFRHHRYDDLVRTLYKVQNECPGITRVYSIGRSVEGRHLYVLEFSDHPGIHEPLEPEVKYVGNMHGNEALGRELMLQLSEFLCEEFRNRNQRIVQLIQDTRIHILPSMNPDGYEVAAAQGPNKPGALVGRNNANGVDLNRNFPDLNTYIYYNEKYGGPNHHLPLPDNWKSQVEPETRAVIRWMHSFNFVLSANLHGGAVVANYPYDKSFEHRVRGVRRTASTPTPDDKLFQKLAKVYSYAHGWMFQGWNCGDYFPDGITNGASWYSLSKGMQDFNYLHTNCFEITLELSCDYFPPEEELQREWLGNREALIQFLEQVHQGIKGMVLDENYNNLANAVISVSGINHDVTSGDHGDYFRLLLPGIYTVSATAPGYDPETVTVTVGPAEPTLVNFHLKRSGSSGGSSGGSSGDAHKSEVAHRFKDLGEENFKALVLIAFAQYLQQCPFEDHVKLVNEVTEFAKTCVADESAENCDKSLHTLFGDKLCTVATLRETYGEMADCCAKQEPERNECFLQHKDDNPNLPRLVRPEVDVMCTAFHDNEETFLKKYLYEIARRHPYFYAPELLFFAKRYKAAFTECCQAADKAACLLPKLDELRDEGKASSAKQRLKCASLQKFGERAFKAWAVARLSQRFPKAEFAEVSKLVTDLTKVHTECCHGDLLECADDRADLAKYICENQDSISSKLKECCEKPLLEKSHCIAEVENDEMPADLPSLAADFVESKDVCKNYAEAKDVFLGMFLYEYARRHPDYSVVLLLRLAKTYETTLEKCCAAADPHECYAKVFDEFKPLVEEPQNLIKQNCELFEQLGEYKFQNALLVRYTKKVPQVSTPTLVEVSRNLGKVGSKCCKHPEAKRMPCAEDYLSVVLNQLCVLHEKTPVSDRVTKCCTESLVNRRPCFSALEVDETYVPKEFNAETFTFHADICTLSEKERQIKKQTALVELVKHKPKATKEQLKAVMDDFAAFVEKCCKADDKETCFAEEGKKLVAASQAALGL

SEQ ID NO: 382 - protein, 995 aa, Artificial Sequence; identical to SEQ ID NO: 375
  hCPN1 variant

SEQ ID NO: 383 - protein, 995 aa, Artificial Sequence
  hCPN1 variant
VTFRHHRYDDLVRTLYKVQNECPGITRVYSIGRSVEGRHLYVLEFSDHPGIHEPLEPEVKYVGNMHGNEALGRELMLQLSEFLCEEFRNRNQRIVQLIQDTRIHILPSMNPDGYEVAAAQGPNKPGALVGRNNANGVDLNRNFPDLNTYIYYNEKYGGPNHHLPLPDNWKSQVEPETRAVIRWMHSFNFVLSANLHGGAVVANYPYDKSFEHRVRGVRRTASTPTPDDKLFQKLAKVYSYAHGWMFQGWNCGDYFPDGITNGASWYSLSKGMQDFNYLHTNCFEITLELSCDMFPPEEELQREWLGNREALIQFLEQVHQGIKGMVLDENYNNLANAVISVSGINHDVTSGDHGDYFRLLLPGIYTVSATAPGYDPETVTVTVGPAEPTLVNFHLKRSGSSGGSSGGSSGDAHKSEVAHRFKDLGEENFKALVLIAFAQYLQQCPFEDHVKLVNEVTEFAKTCVADESAENCDKSLHTLFGDKLCTVATLRETYGEMADCCAKQEPERNECFLQHKDDNPNLPRLVRPEVDVMCTAFHDNEETFLKKYLYEIARRHPYFYAPELLFFAKRYKAAFTECCQAADKAACLLPKLDELRDEGKASSAKQRLKCASLQKFGERAFKAWAVARLSQRFPKAEFAEVSKLVTDLTKVHTECCHGDLLECADDRADLAKYICENQDSISSKLKECCEKPLLEKSHCIAEVENDEMPADLPSLAADFVESKDVCKNYAEAKDVFLGMFLYEYARRHPDYSVVLLLRLAKTYETTLEKCCAAADPHECYAKVFDEFKPLVEEPQNLIKQNCELFEQLGEYKFQNALLVRYTKKVPQVSTPTLVEVSRNLGKVGSKCCKHPEAKRMPCAEDYLSVVLNQLCVLHEKTPVSDRVTKCCTESLVNRRPCFSALEVDETYVPKEFNAETFTFHADICTLSEKERQIKKQTALVELVKHKPKATKEQLKAVMDDFAAFVEKCCKADDKETCFAEEGKKLVAASQAALGL

SEQ ID NO: 384 - protein, 995 aa, Artificial Sequence
  hCPN1 variant
VTFRHHRYDDLVRTLYKVQNECPGITRVYSIGRSVEGRHLYVLEFSDHPGIHEPLEPEVKYVGNMHGNEALGRELMLQLSEFLCEEFRNRNQRIVQLIQDTRIHILPSMNPDGYEVAAAQGPNKPGKLVGRNNANGVDLNRNFPDLNTYIYYNEKYGGPNHHLPLPDNWKSQVEPETRAVIRWMHSFNFVLSANLHGGAVVANYPYDKSFEHRVRGVRRTASTPTPDDKLFQKLAKVYSYAHGWMFQGWNCGDYFPDGITNGASWYSLSKGMQDFNYLHTNCFEITLELSCDPFPPEEELQREWLGNREALIQFLEQVHQGIKGMVLDENYNNLANAVISVSGINHDVTSGDHGDYFRLLLPGIYTVSATAPGYDPETVTVTVGPAEPTLVNFHLKRSGSSGGSSGGSSGDAHKSEVAHRFKDLGEENFKALVLIAFAQYLQQCPFEDHVKLVNEVTEFAKTCVADESAENCDKSLHTLFGDKLCTVATLRETYGEMADCCAKQEPERNECFLQHKDDNPNLPRLVRPEVDVMCTAFHDNEETFLKKYLYEIARRHPYFYAPELLFFAKRYKAAFTECCQAADKAACLLPKLDELRDEGKASSAKQRLKCASLQKFGERAFKAWAVARLSQRFPKAEFAEVSKLVTDLTKVHTECCHGDLLECADDRADLAKYICENQDSISSKLKECCEKPLLEKSHCIAEVENDEMPADLPSLAADFVESKDVCKNYAEAKDVFLGMFLYEYARRHPDYSVVLLLRLAKTYETTLEKCCAAADPHECYAKVFDEFKPLVEEPQNLIKQNCELFEQLGEYKFQNALLVRYTKKVPQVSTPTLVEVSRNLGKVGSKCCKHPEAKRMPCAEDYLSVVLNQLCVLHEKTPVSDRVTKCCTESLVNRRPCFSALEVDETYVPKEFNAETFTFHADICTLSEKERQIKKQTALVELVKHKPKATKEQLKAVMDDFAAFVEKCCKADDKETCFAEEGKKLVAASQAALGL

SEQ ID NO: 385 - protein, 995 aa, Artificial Sequence
  hCPN1 variant
VTFRHHRYDDLVRTLYKVQNECPGITRVYSIGRSVEGRHLYVLEFSDHPGIHEPLEPEVKYVGNMHGNEALGRELMLQLSEFLCEEFRNRNQRIVQLIQDTRIHILPSMNPDGYEVAAAQGPNKPGYLVGRNNANGVDLNRNFPDLNTYIYYNEKYGGPNHHLPLPDNWKSQVEPETRAVIRWMHSFNFVLSANLHGGAVVANYPYDKSFEHRVRGVRRTASTPTPDDKLFQKLAKVYSYAHGWMFQGWNCGDYFPDGITNGASWYSLSKGMQDFNYLHTNCFEITLELSCVAFPPEEELQREWLGNREALIQFLEQVHQGIKGMVLDENYNNLANAVISVSGINHDVTSGDHGDYFRLLLPGIYTVSATAPGYDPETVTVTVGPAEPTLVNFHLKRSGSSGGSSGGSSGDAHKSEVAHRFKDLGEENFKALVLIAFAQYLQQCPFEDHVKLVNEVTEFAKTCVADESAENCDKSLHTLFGDKLCTVATLRETYGEMADCCAKQEPERNECFLQHKDDNPNLPRLVRPEVDVMCTAFHDNEETFLKKYLYEIARRHPYFYAPELLFFAKRYKAAFTECCQAADKAACLLPKLDELRDEGKASSAKQRLKCASLQKFGERAFKAWAVARLSQRFPKAEFAEVSKLVTDLTKVHTECCHGDLLECADDRADLAKYICENQDSISSKLKECCEKPLLEKSHCIAEVENDEMPADLPSLAADFVESKDVCKNYAEAKDVFLGMFLYEYARRHPDYSVVLLLRLAKTYETTLEKCCAAADPHECYAKVFDEFKPLVEEPQNLIKQNCELFEQLGEYKFQNALLVRYTKKVPQVSTPTLVEVSRNLGKVGSKCCKHPEAKRMPCAEDYLSVVLNQLCVLHEKTPVSDRVTKCCTESLVNRRPCFSALEVDETYVPKEFNAETFTFHADICTLSEKERQIKKQTALVELVKHKPKATKEQLKAVMDDFAAFVEKCCKADDKETCFAEEGKKLVAASQAALGL

SEQ ID NO: 386 - protein, 995 aa, Artificial Sequence
  hCPN1 variant
VTFRHHRYDDLVRTLYKVQNECPGITRVYSIGRSVEGRHLYVLEFSDHPGIHEPLEPEVKYVGNMHGNEALGRELMLQLSEFLCEEFRNRNQRIVQLIQDTRIHILPSMNPDGYEVAAAQGPNKPGYLVGRNNANGVDLNRNFPDLNTYIYYNEKYGGPNHHLPLPDNWKSQVEPETRAVIRWMHSFNFVLSANLHGGAVVANYPYDKSFEHRVRGVRRTASTPTPDDKLFQKLAKVYSYAHGWMFQGWNCGDYFPDGITNGASWYSLSKGMQDFNYLHTNCFEITLELSCDPFPPEEELQREWLGNREALIQFLEQVHQGIKGMVLDENYNNLANAVISVSGINHDVTSGDHGDYFRLLLPGIYTVSATAPGYDPETVTVTVGPAEPTLVNFHLKRSGSSGGSSGGSSGDAHKSEVAHRFKDLGEENFKALVLIAFAQYLQQCPFEDHVKLVNEVTEFAKTCVADESAENCDKSLHTLFGDKLCTVATLRETYGEMADCCAKQEPERNECFLQHKDDNPNLPRLVRPEVDVMCTAFHDNEETFLKKYLYEIARRHPYFYAPELLFFAKRYKAAFTECCQAADKAACLLPKLDELRDEGKASSAKQRLKCASLQKFGERAFKAWAVARLSQRFPKAEFAEVSKLVTDLTKVHTECCHGDLLECADDRADLAKYICENQDSISSKLKECCEKPLLEKSHCIAEVENDEMPADLPSLAADFVESKDVCKNYAEAKDVFLGMFLYEYARRHPDYSVVLLLRLAKTYETTLEKCCAAADPHECYAKVFDEFKPLVEEPQNLIKQNCELFEQLGEYKFQNALLVRYTKKVPQVSTPTLVEVSRNLGKVGSKCCKHPEAKRMPCAEDYLSVVLNQLCVLHEKTPVSDRVTKCCTESLVNRRPCFSALEVDETYVPKEFNAETFTFHADICTLSEKERQIKKQTALVELVKHKPKATKEQLKAVMDDFAAFVEKCCKADDKETCFAEEGKKLVAASQAALGL

SEQ ID NO: 387 - protein, 995 aa, Artificial Sequence
  hCPN1 variant
VTFRHHRYDDLVRTLYKVQNECPGITRVYSIGRSVEGRHLYVLEFSDHPGIHEPLEPEVKYVGNMHGNEALGRELMLQLSEFLCEEFRNRNQRIVQLIQDTRIHILPSMNPDGYEVAAAQGPNKPGKDVGRNNANGVDLNRNFPDLNTYIYYNEKYGGPNHHLPLPDNWKSQVEPETRAVIRWMHSFNFVLSANLHGGAVVANYPYDKSFEHRVRGVRRTASTPTPDDKLFQKLAKVYSYAHGWMFQGWNCGDYFPDGITNGASWYSLSKGMQDFNYLHTNCFEITLELSCDYFPPEEELQREWLGNREALIQFLEQVHQGIKGMVLDENYNNLANAVISVSGINHDVTSGDHGDYFRLLLPGIYTVSATAPGYDPETVTVTVGPAEPTLVNFHLKRSGSSGGSSGGSSGDAHKSEVAHRFKDLGEENFKALVLIAFAQYLQQCPFEDHVKLVNEVTEFAKTCVADESAENCDKSLHTLFGDKLCTVATLRETYGEMADCCAKQEPERNECFLQHKDDNPNLPRLVRPEVDVMCTAFHDNEETFLKKYLYEIARRHPYFYAPELLFFAKRYKAAFTECCQAADKAACLLPKLDELRDEGKASSAKQRLKCASLQKFGERAFKAWAVARLSQRFPKAEFAEVSKLVTDLTKVHTECCHGDLLECADDRADLAKYICENQDSISSKLKECCEKPLLEKSHCIAEVENDEMPADLPSLAADFVESKDVCKNYAEAKDVFLGMFLYEYARRHPDYSVVLLLRLAKTYETTLEKCCAAADPHECYAKVFDEFKPLVEEPQNLIKQNCELFEQLGEYKFQNALLVRYTKKVPQVSTPTLVEVSRNLGKVGSKCCKHPEAKRMPCAEDYLSVVLNQLCVLHEKTPVSDRVTKCCTESLVNRRPCFSALEVDETYVPKEFNAETFTFHADICTLSEKERQIKKQTALVELVKHKPKATKEQLKAVMDDFAAFVEKCCKADDKETCFAEEGKKLVAASQAALGL

SEQ ID NO: 388 - protein, 995 aa, Artificial Sequence
  hCPN1 variant
VTFRHHRYDDLVRTLYKVQNECPGITRVYSIGRSVEGRHLYVLEFSDHPGIHEPLEPEVKYVGNMHGNEALGRELMLQLSEFLCEEFRNRNQRIVQLIQDTRIHILPSMNPDGYEVAAAQGPNKPGLHVGRNNANGVDLNRNFPDLNTYIYYNEKYGGPNHHLPLPDNWKSQVEPETRAVIRWMHSFNFVLSANLHGGAVVANYPYDKSFEHRVRGVRRTASTPTPDDKLFQKLAKVYSYAHGWMFQGWNCGDYFPDGITNGASWYSLSKGMQDFNYLHTNCFEITLELSCDPFPPEEELQREWLGNREALIQFLEQVHQGIKGMVLDENYNNLANAVISVSGINHDVTSGDHGDYFRLLLPGIYTVSATAPGYDPETVTVTVGPAEPTLVNFHLKRSGSSGGSSGGSSGDAHKSEVAHRFKDLGEENFKALVLIAFAQYLQQCPFEDHVKLVNEVTEFAKTCVADESAENCDKSLHTLFGDKLCTVATLRETYGEMADCCAKQEPERNECFLQHKDDNPNLPRLVRPEVDVMCTAFHDNEETFLKKYLYEIARRHPYFYAPELLFFAKRYKAAFTECCQAADKAACLLPKLDELRDEGKASSAKQRLKCASLQKFGERAFKAWAVARLSQRFPKAEFAEVSKLVTDLTKVHTECCHGDLLECADDRADLAKYICENQDSISSKLKECCEKPLLEKSHCIAEVENDEMPADLPSLAADFVESKDVCKNYAEAKDVFLGMFLYEYARRHPDYSVVLLLRLAKTYETTLEKCCAAADPHECYAKVFDEFKPLVEEPQNLIKQNCELFEQLGEYKFQNALLVRYTKKVPQVSTPTLVEVSRNLGKVGSKCCKHPEAKRMPCAEDYLSVVLNQLCVLHEKTPVSDRVTKCCTESLVNRRPCFSALEVDETYVPKEFNAETFTFHADICTLSEKERQIKKQTALVELVKHKPKATKEQLKAVMDDFAAFVEKCCKADDKETCFAEEGKKLVAASQAALGL

SEQ ID NO: 389 - protein, 995 aa, Artificial Sequence
  hCPN1 variant
VTFRHHRYDDLVRTLYKVQNECPGITRVYSIGRSVEGRHLYVLEFSDHPGIHEPLEPEVKYVGNMHGNEALGRELMLQLSEFLCEEFRNRNQRIVQLIQDTRIHILPSMNPDGYEVAAAQGPNKPGKHVGRNNANGVDLNRNFPDLNTYIYYNEKYGGPNHHLPLPDNWKSQVEPETRAVIRWMHSFNFVLSANLHGGAVVANYPYDKSFEHRVRGVRRTASTPTPDDKLFQKLAKVYSYAHGWMFQGWNCGDYFPDGITNGASWYSLSKGMQDFNYLHTNCFEITLELSCDPFPPEEELQREWLGNREALIQFLEQVHQGIKGMVLDENYNNLANAVISVSGINHDVTSGDHGDYFRLLLPGIYTVSATAPGYDPETVTVTVGPAEPTLVNFHLKRSGSSGGSSGGSSGDAHKSEVAHRFKDLGEENFKALVLIAFAQYLQQCPFEDHVKLVNEVTEFAKTCVADESAENCDKSLHTLFGDKLCTVATLRETYGEMADCCAKQEPERNECFLQHKDDNPNLPRLVRPEVDVMCTAFHDNEETFLKKYLYEIARRHPYFYAPELLFFAKRYKAAFTECCQAADKAACLLPKLDELRDEGKASSAKQRLKCASLQKFGERAFKAWAVARLSQRFPKAEFAEVSKLVTDLTKVHTECCHGDLLECADDRADLAKYICENQDSISSKLKECCEKPLLEKSHCIAEVENDEMPADLPSLAADFVESKDVCKNYAEAKDVFLGMFLYEYARRHPDYSVVLLLRLAKTYETTLEKCCAAADPHECYAKVFDEFKPLVEEPQNLIKQNCELFEQLGEYKFQNALLVRYTKKVPQVSTPTLVEVSRNLGKVGSKCCKHPEAKRMPCAEDYLSVVLNQLCVLHEKTPVSDRVTKCCTESLVNRRPCFSALEVDETYVPKEFNAETFTFHADICTLSEKERQIKKQTALVELVKHKPKATKEQLKAVMDDFAAFVEKCCKADDKETCFAEEGKKLVAASQAALGL

SEQ ID NO: 390 - protein, 995 aa, Artificial Sequence
  hCPN1 variant
VTFRHHRYDDLVRTLYKVQNECPGITRVYSIGRSVEGRHLYVLEFSDHPGIHEPLEPEVKYVGNMHGNEALGRELMLQLSEFLCEEFRNRNQRIVQLIQDTRIHILPSMNPDGYEVAAAQGPNKPGYDVGRNNANGVDLNRNFPDLNTYIYYNEKYGGPNHHLPLPDNWKSQVEPETRAVIRWMHSFNFVLSANLHGGAVVANYPYDKSFEHRVRGVRRTASTPTPDDKLFQKLAKVYSYAHGWMFQGWNCGDYFPDGITNGASWYSLSKGMQDFNYLHTNCFEITLELSCDKFPPEEELQREWLGNREALIQFLEQVHQGIKGMVLDENYNNLANAVISVSGINHDVTSGDHGDYFRLLLPGIYTVSATAPGYDPETVTVTVGPAEPTLVNFHLKRSGSSGGSSGGSSGDAHKSEVAHRFKDLGEENFKALVLIAFAQYLQQCPFEDHVKLVNEVTEFAKTCVADESAENCDKSLHTLFGDKLCTVATLRETYGEMADCCAKQEPERNECFLQHKDDNPNLPRLVRPEVDVMCTAFHDNEETFLKKYLYEIARRHPYFYAPELLFFAKRYKAAFTECCQAADKAACLLPKLDELRDEGKASSAKQRLKCASLQKFGERAFKAWAVARLSQRFPKAEFAEVSKLVTDLTKVHTECCHGDLLECADDRADLAKYICENQDSISSKLKECCEKPLLEKSHCIAEVENDEMPADLPSLAADFVESKDVCKNYAEAKDVFLGMFLYEYARRHPDYSVVLLLRLAKTYETTLEKCCAAADPHECYAKVFDEFKPLVEEPQNLIKQNCELFEQLGEYKFQNALLVRYTKKVPQVSTPTLVEVSRNLGKVGSKCCKHPEAKRMPCAEDYLSVVLNQLCVLHEKTPVSDRVTKCCTESLVNRRPCFSALEVDETYVPKEFNAETFTFHADICTLSEKERQIKKQTALVELVKHKPKATKEQLKAVMDDFAAFVEKCCKADDKETCFAEEGKKLVAASQAALGL

SEQ ID NO: 391 - protein, 995 aa, Artificial Sequence
  hCPN1 variant
VTFRHHRYDDLVRTLYKVQNECPGITRVYSIGRSVEGRHLYVLEFSDHPGIHEPLEPEVKYVGNMHGNEALGRELMLQLSEFLCEEFRNRNQRIVQLIQDTRIHILPSMNPDGYEVAAAQGPNKPGYLVGRNNANGVDLNRNFPDLNTYIYYNEKYGGPNHHLPLPDNWKSQVEPETRAVIRWMHSFNFVLSANLHGGAVVANYPYDKSFEHRVRGVRRTASTPTPDDKLFQKLAKVYSYAHGWMFQGWNSGDYFPDGITNGASWYSLSKGMQDFNYLHTNCFEITLELSSDKFPPEEELQREWLGNREALIQFLEQVHQGIKGMVLDENYNNLANAVISVSGINHDVTSGDHGDYFRLLLPGIYTVSATAPGYDPETVTVTVGPAEPTLVNFHLKRSGSSGGSSGGSSGDAHKSEVAHRFKDLGEENFKALVLIAFAQYLQQCPFEDHVKLVNEVTEFAKTCVADESAENCDKSLHTLFGDKLCTVATLRETYGEMADCCAKQEPERNECFLQHKDDNPNLPRLVRPEVDVMCTAFHDNEETFLKKYLYEIARRHPYFYAPELLFFAKRYKAAFTECCQAADKAACLLPKLDELRDEGKASSAKQRLKCASLQKFGERAFKAWAVARLSQRFPKAEFAEVSKLVTDLTKVHTECCHGDLLECADDRADLAKYICENQDSISSKLKECCEKPLLEKSHCIAEVENDEMPADLPSLAADFVESKDVCKNYAEAKDVFLGMFLYEYARRHPDYSVVLLLRLAKTYETTLEKCCAAADPHECYAKVFDEFKPLVEEPQNLIKQNCELFEQLGEYKFQNALLVRYTKKVPQVSTPTLVEVSRNLGKVGSKCCKHPEAKRMPCAEDYLSVVLNQLCVLHEKTPVSDRVTKCCTESLVNRRPCFSALEVDETYVPKEFNAETFTFHADICTLSEKERQIKKQTALVELVKHKPKATKEQLKAVMDDFAAFVEKCCKADDKETCFAEEGKKLVAASQAALGL

SEQ ID NO: 392 - protein, 995 aa, Artificial Sequence
  hCPN1 variant
VTFRHHRYDDLVRTLYKVQNECPGITRVYSIGRSVEGRHLYVLEFSDHPGIHEPLEPEVKYVGNMHGNEALGRELMLQLSEFLCEEFRNRNQRIVQLIQDTRIHILPSMNPDGYEVAAAQGPNKPGYLVGRNNANGVDLNRNFPDLNTYIYYNEKYGGPNHHLPLPDNWKSQVEPETRAVIRWMHSFNFVLSANLHGGAVVANYPYDKSFEHRVRGVRRTASCPTPDDKLFQKLAKVYSYAHGWMFQGWNCGDYFPDGITNGCSWYSLSKGMQDFNYLHTNCFEITLELSCDKFPPEEELQREWLGNREALIQFLEQVHQGIKGMVLDENYNNLANAVISVSGINHDVTSGDHGDYFRLLLPGIYTVSATAPGYDPETVTVTVGPAEPTLVNFHLKRSGSSGGSSGGSSGDAHKSEVAHRFKDLGEENFKALVLIAFAQYLQQCPFEDHVKLVNEVTEFAKTCVADESAENCDKSLHTLFGDKLCTVATLRETYGEMADCCAKQEPERNECFLQHKDDNPNLPRLVRPEVDVMCTAFHDNEETFLKKYLYEIARRHPYFYAPELLFFAKRYKAAFTECCQAADKAACLLPKLDELRDEGKASSAKQRLKCASLQKFGERAFKAWAVARLSQRFPKAEFAEVSKLVTDLTKVHTECCHGDLLECADDRADLAKYICENQDSISSKLKECCEKPLLEKSHCIAEVENDEMPADLPSLAADFVESKDVCKNYAEAKDVFLGMFLYEYARRHPDYSVVLLLRLAKTYETTLEKCCAAADPHECYAKVFDEFKPLVEEPQNLIKQNCELFEQLGEYKFQNALLVRYTKKVPQVSTPTLVEVSRNLGKVGSKCCKHPEAKRMPCAEDYLSVVLNQLCVLHEKTPVSDRVTKCCTESLVNRRPCFSALEVDETYVPKEFNAETFTFHADICTLSEKERQIKKQTALVELVKHKPKATKEQLKAVMDDFAAFVEKCCKADDKETCFAEEGKKLVAASQAALGL

SEQ ID NO: 393 - protein, 995 aa, Artificial Sequence
  hCPN1 variant
VTFRHHRYDDLVRTLYKVQNECPGITRVYSIGRSVEGRHLYVLEFSDHPGIHEPLEPEVKYVGNMHGNEALGRELMLQLSEFLCEEFRNRNQRIVQLIQDTRIHILPSMNPDGYEVAAAQGPNKPGYLVGRNNANGVDLNRNFPDLNTYIYYNEKYGGPNHHLPLPDNWKSQVEPETRAVIRWMHSFNFVLSANLHGGAVVANYPYDKCFEHRVRGVRRTASTPTPDDKLFQKLAKVYSYAHGWMFQGWNCGDYFPDGITNGCSWYSLSKGMQDFNYLHTNCFEITLELSCDKFPPEEELQREWLGNREALIQFLEQVHQGIKGMVLDENYNNLANAVISVSGINHDVTSGDHGDYFRLLLPGIYTVSATAPGYDPETVTVTVGPAEPTLVNFHLKRSGSSGGSSGGSSGDAHKSEVAHRFKDLGEENFKALVLIAFAQYLQQCPFEDHVKLVNEVTEFAKTCVADESAENCDKSLHTLFGDKLCTVATLRETYGEMADCCAKQEPERNECFLQHKDDNPNLPRLVRPEVDVMCTAFHDNEETFLKKYLYEIARRHPYFYAPELLFFAKRYKAAFTECCQAADKAACLLPKLDELRDEGKASSAKQRLKCASLQKFGERAFKAWAVARLSQRFPKAEFAEVSKLVTDLTKVHTECCHGDLLECADDRADLAKYICENQDSISSKLKECCEKPLLEKSHCIAEVENDEMPADLPSLAADFVESKDVCKNYAEAKDVFLGMFLYEYARRHPDYSVVLLLRLAKTYETTLEKCCAAADPHECYAKVFDEFKPLVEEPQNLIKQNCELFEQLGEYKFQNALLVRYTKKVPQVSTPTLVEVSRNLGKVGSKCCKHPEAKRMPCAEDYLSVVLNQLCVLHEKTPVSDRVTKCCTESLVNRRPCFSALEVDETYVPKEFNAETFTFHADICTLSEKERQIKKQTALVELVKHKPKATKEQLKAVMDDFAAFVEKCCKADDKETCFAEEGKKLVAASQAALGL

SEQ ID NO: 394 - protein, 995 aa, Artificial Sequence
  hCPN1 variant
VTFRHHRYDDLVRTLYKVQNECPGITRVYSIGRSVEGRHLYVLEFSDHPGIHEPLEPEVKYVGNMHGNEALGRELMLQLSEFLCEEFRNRNQRIVQLIQDTRIHILPSMNPDGYEVAAAQGPNKPGYLVGRNNANGVDLNRNFPDLNTYIYYNEKYGGPNHHLPLPDNWKSQVEPETRAVIRWMHSFNFVLSANLHGGAVVANYPYDKCFEHRVRGVRRTASTPTPDDKLFQKLAKVYSYAHGWMFQGWNCGDYFPDGITNGASWYCLSKGMQDFNYLHTNCFEITLELSCDKFPPEEELQREWLGNREALIQFLEQVHQGIKGMVLDENYNNLANAVISVSGINHDVTSGDHGDYFRLLLPGIYTVSATAPGYDPETVTVTVGPAEPTLVNFHLKRSGSSGGSSGGSSGDAHKSEVAHRFKDLGEENFKALVLIAFAQYLQQCPFEDHVKLVNEVTEFAKTCVADESAENCDKSLHTLFGDKLCTVATLRETYGEMADCCAKQEPERNECFLQHKDDNPNLPRLVRPEVDVMCTAFHDNEETFLKKYLYEIARRHPYFYAPELLFFAKRYKAAFTECCQAADKAACLLPKLDELRDEGKASSAKQRLKCASLQKFGERAFKAWAVARLSQRFPKAEFAEVSKLVTDLTKVHTECCHGDLLECADDRADLAKYICENQDSISSKLKECCEKPLLEKSHCIAEVENDEMPADLPSLAADFVESKDVCKNYAEAKDVFLGMFLYEYARRHPDYSVVLLLRLAKTYETTLEKCCAAADPHECYAKVFDEFKPLVEEPQNLIKQNCELFEQLGEYKFQNALLVRYTKKVPQVSTPTLVEVSRNLGKVGSKCCKHPEAKRMPCAEDYLSVVLNQLCVLHEKTPVSDRVTKCCTESLVNRRPCFSALEVDETYVPKEFNAETFTFHADICTLSEKERQIKKQTALVELVKHKPKATKEQLKAVMDDFAAFVEKCCKADDKETCFAEEGKKLVAASQAALGL

SEQ ID NO: 395 - protein, 995 aa, Artificial Sequence
  hCPN1 variant
VTFRHHRYDDLVRTLYKVQNECPGITRVYSIGRSVEGRHLYVLEFSDHPGIHEPLEPEVKYVGNMHGNEALGRELMLQLSEFLCEEFRNRNQRIVQLIQDTRIHILPSMNPDGYEVAAAQGPNKPGYLVGRNNANGVDLNRNFPDLNTYIYYNEKYGGPNHHLPLPDNWKSQVEPETRAVIRWMHSFNFVLSANLHGGAVVANYPYDKSFEHRVRGVRRTASTPTPDDKLFQKLAKVYSYAHGWMFQGWNCGDYFPDGITNGASWYCLCKGMQDFNYLHTNCFEITLELSCDKFPPEEELQREWLGNREALIQFLEQVHQGIKGMVLDENYNNLANAVISVSGINHDVTSGDHGDYFRLLLPGIYTVSATAPGYDPETVTVTVGPAEPTLVNFHLKRSGSSGGSSGGSSGDAHKSEVAHRFKDLGEENFKALVLIAFAQYLQQCPFEDHVKLVNEVTEFAKTCVADESAENCDKSLHTLFGDKLCTVATLRETYGEMADCCAKQEPERNECFLQHKDDNPNLPRLVRPEVDVMCTAFHDNEETFLKKYLYEIARRHPYFYAPELLFFAKRYKAAFTECCQAADKAACLLPKLDELRDEGKASSAKQRLKCASLQKFGERAFKAWAVARLSQRFPKAEFAEVSKLVTDLTKVHTECCHGDLLECADDRADLAKYICENQDSISSKLKECCEKPLLEKSHCIAEVENDEMPADLPSLAADFVESKDVCKNYAEAKDVFLGMFLYEYARRHPDYSVVLLLRLAKTYETTLEKCCAAADPHECYAKVFDEFKPLVEEPQNLIKQNCELFEQLGEYKFQNALLVRYTKKVPQVSTPTLVEVSRNLGKVGSKCCKHPEAKRMPCAEDYLSVVLNQLCVLHEKTPVSDRVTKCCTESLVNRRPCFSALEVDETYVPKEFNAETFTFHADICTLSEKERQIKKQTALVELVKHKPKATKEQLKAVMDDFAAFVEKCCKADDKETCFAEEGKKLVAASQAALGL

SEQ ID NO: 396 - protein, 995 aa, Artificial Sequence
  hCPN1 variant
VTFRHHRYDDLVRTLYKVQNECPGITRVYSIGRSVEGRHLYVLEFSDHPGIHEPLEPEVFYVGNMHGNEALGRELMLQLSEFLCEEFRNRNQRIVQLIQDTRIHILPSMNPDGYEVAAAQGPNKPGYLVGRNNANGVDLNRNFPDLNTYIYYNEKYGGPNHHLPLPDNWKSQVEPETRAFIRWMHSFNFVLAANLHGGAVVANYPYDKSFEHRVRGVRRTASCPTPDDKLFQKLAKVYSYAHGWMFQGWNCGDYFPDGITNGCSWYSLSKGMQDFVYLHTNCFIITLELSCDKFPPEEELQREWLGNREALIQFLEQVHQGIKGMVLDENYNNLANAVISVSGINHDVTSGDHGDYFRLLLPGIYTVSATAPGYDPETVTVTVGPAEPTLVNFHLKRSGSSGGSSGGSSGDAHKSEVAHRFKDLGEENFKALVLIAFAQYLQQCPFEDHVKLVNEVTEFAKTCVADESAENCDKSLHTLFGDKLCTVATLRETYGEMADCCAKQEPERNECFLQHKDDNPNLPRLVRPEVDVMCTAFHDNEETFLKKYLYEIARRHPYFYAPELLFFAKRYKAAFTECCQAADKAACLLPKLDELRDEGKASSAKQRLKCASLQKFGERAFKAWAVARLSQRFPKAEFAEVSKLVTDLTKVHTECCHGDLLECADDRADLAKYICENQDSISSKLKECCEKPLLEKSHCIAEVENDEMPADLPSLAADFVESKDVCKNYAEAKDVFLGMFLYEYARRHPDYSVVLLLRLAKTYETTLEKCCAAADPHECYAKVFDEFKPLVEEPQNLIKQNCELFEQLGEYKFQNALLVRYTKKVPQVSTPTLVEVSRNLGKVGSKCCKHPEAKRMPCAEDYLSVVLNQLCVLHEKTPVSDRVTKCCTESLVNRRPCFSALEVDETYVPKEFNAETFTFHADICTLSEKERQIKKQTALVELVKHKPKATKEQLKAVMDDFAAFVEKCCKADDKETCFAEEGKKLVAASQAALGL

SEQ ID NO: 397 - protein, 995 aa, Artificial Sequence
  hCPN1 variant
VTFRHHRYDDLVRTLYKVQNECPGITRVYSIGRSVEGRHLYVLEFSDHPGIHEPLEPEVFYVGNMHGNEALGRELMLQLSEFLCEEFRNRNQRIVQLIQDTRIHILPSMNPDGYEVAAAQGPNKPGYLVGRNNANGVDLNRNFPDLNTYIYYNEKYGGPNHHLPLPDNWKSQVEPETRAFIRWMHSFNFVLAANLHGGAVVANYPYDKCFEHRVRGVRRTASTPTPDDKLFQKLAKVYSYAHGWMFQGWNCGDYFPDGITNGCSWYSLSKGMQDFVYLHTNCFIITLELSCDKFPPEEELQREWLGNREALIQFLEQVHQGIKGMVLDENYNNLANAVISVSGINHDVTSGDHGDYFRLLLPGIYTVSATAPGYDPETVTVTVGPAEPTLVNFHLKRSGSSGGSSGGSSGDAHKSEVAHRFKDLGEENFKALVLIAFAQYLQQCPFEDHVKLVNEVTEFAKTCVADESAENCDKSLHTLFGDKLCTVATLRETYGEMADCCAKQEPERNECFLQHKDDNPNLPRLVRPEVDVMCTAFHDNEETFLKKYLYEIARRHPYFYAPELLFFAKRYKAAFTECCQAADKAACLLPKLDELRDEGKASSAKQRLKCASLQKFGERAFKAWAVARLSQRFPKAEFAEVSKLVTDLTKVHTECCHGDLLECADDRADLAKYICENQDSISSKLKECCEKPLLEKSHCIAEVENDEMPADLPSLAADFVESKDVCKNYAEAKDVFLGMFLYEYARRHPDYSVVLLLRLAKTYETTLEKCCAAADPHECYAKVFDEFKPLVEEPQNLIKQNCELFEQLGEYKFQNALLVRYTKKVPQVSTPTLVEVSRNLGKVGSKCCKHPEAKRMPCAEDYLSVVLNQLCVLHEKTPVSDRVTKCCTESLVNRRPCFSALEVDETYVPKEFNAETFTFHADICTLSEKERQIKKQTALVELVKHKPKATKEQLKAVMDDFAAFVEKCCKADDKETCFAEEGKKLVAASQAALGL

SEQ ID NO: 398 - protein, 995 aa, Artificial Sequence
  hCPN1 variant
VTFRHHRYDDLVRTLYKVQNECPGITRVYSIGRSVEGRHLYVLEFSDHPGIHEPLEPEVFYVGNMHGNEALGRELMLQLSEFLCEEFRNRNQRIVQLIQDTRIHILPSMNPDGYEVAAAQGPNKPGYLVGRNNANGVDLNRNFPDLNTYIYYNEKYGGPNHHLPLPDNWKSQVEPETRAFIRWMHSFNFVLAANLHGGAVVANYPYDKCFEHRVRGVRRTASTPTPDDKLFQKLAKVYSYAHGWMFQGWNCGDYFPDGITNGASWYCLSKGMQDFVYLHTNCFIITLELSCDKFPPEEELQREWLGNREALIQFLEQVHQGIKGMVLDENYNNLANAVISVSGINHDVTSGDHGDYFRLLLPGIYTVSATAPGYDPETVTVTVGPAEPTLVNFHLKRSGSSGGSSGGSSGDAHKSEVAHRFKDLGEENFKALVLIAFAQYLQQCPFEDHVKLVNEVTEFAKTCVADESAENCDKSLHTLFGDKLCTVATLRETYGEMADCCAKQEPERNECFLQHKDDNPNLPRLVRPEVDVMCTAFHDNEETFLKKYLYEIARRHPYFYAPELLFFAKRYKAAFTECCQAADKAACLLPKLDELRDEGKASSAKQRLKCASLQKFGERAFKAWAVARLSQRFPKAEFAEVSKLVTDLTKVHTECCHGDLLECADDRADLAKYICENQDSISSKLKECCEKPLLEKSHCIAEVENDEMPADLPSLAADFVESKDVCKNYAEAKDVFLGMFLYEYARRHPDYSVVLLLRLAKTYETTLEKCCAAADPHECYAKVFDEFKPLVEEPQNLIKQNCELFEQLGEYKFQNALLVRYTKKVPQVSTPTLVEVSRNLGKVGSKCCKHPEAKRMPCAEDYLSVVLNQLCVLHEKTPVSDRVTKCCTESLVNRRPCFSALEVDETYVPKEFNAETFTFHADICTLSEKERQIKKQTALVELVKHKPKATKEQLKAVMDDFAAFVEKCCKADDKETCFAEEGKKLVAASQAALGL

SEQ ID NO: 399 - protein, 995 aa, Artificial Sequence
  hCPN1 variant
VTFRHHRYDDLVRTLYKVQNECPGITRVYSIGRSVEGRHLYVLEFSDHPGIHEPLEPEVFYVGNMHGNEALGRELMLQLSEFLCEEFRNRNQRIVQLIQDTRIHILPSMNPDGYEVAAAQGPNKPGYLVGRNNANGVDLNRNFPDLNTYIYYNEKYGGPNHHLPLPDNWKSQVEPETRAFIRWMHSFNFVLAANLHGGAVVANYPYDKSFEHRVRGVRRTASTPTPDDKLFQKLAKVYSYAHGWMFQGWNCGDYFPDGITNGASWYCLCKGMQDFVYLHTNCFIITLELSCDKFPPEEELQREWLGNREALIQFLEQVHQGIKGMVLDENYNNLANAVISVSGINHDVTSGDHGDYFRLLLPGIYTVSATAPGYDPETVTVTVGPAEPTLVNFHLKRSGSSGGSSGGSSGDAHKSEVAHRFKDLGEENFKALVLIAFAQYLQQCPFEDHVKLVNEVTEFAKTCVADESAENCDKSLHTLFGDKLCTVATLRETYGEMADCCAKQEPERNECFLQHKDDNPNLPRLVRPEVDVMCTAFHDNEETFLKKYLYEIARRHPYFYAPELLFFAKRYKAAFTECCQAADKAACLLPKLDELRDEGKASSAKQRLKCASLQKFGERAFKAWAVARLSQRFPKAEFAEVSKLVTDLTKVHTECCHGDLLECADDRADLAKYICENQDSISSKLKECCEKPLLEKSHCIAEVENDEMPADLPSLAADFVESKDVCKNYAEAKDVFLGMFLYEYARRHPDYSVVLLLRLAKTYETTLEKCCAAADPHECYAKVFDEFKPLVEEPQNLIKQNCELFEQLGEYKFQNALLVRYTKKVPQVSTPTLVEVSRNLGKVGSKCCKHPEAKRMPCAEDYLSVVLNQLCVLHEKTPVSDRVTKCCTESLVNRRPCFSALEVDETYVPKEFNAETFTFHADICTLSEKERQIKKQTALVELVKHKPKATKEQLKAVMDDFAAFVEKCCKADDKETCFAEEGKKLVAASQAALGL

SEQ ID NO: 400 - protein, 995 aa, Artificial Sequence
  hCPN1 variant
VTFRHHRYDDLVRTLYKVQNECPGITRVYSIGRSVEGRHLYVLEFSDHPGIHEPLEPEVKYVGNMHGNEALGRELMLQLSEFLCEEFRNRNQRIVQLIQDTRIHILPSMNPDGYEVAAAQAPNKPGYLVGRNNANGVDLNRNFPDLNTYIYYNEKYGGPNHHLPLPDNWKSQVEPETRAVIRWMHSFNFVLSANLHGGAVVANYPYDKSFEHRVRGVRRTASTPTPDDKLFQKLAKVYSYAHGWMFQGWNCGDYFPDGITNGASWYSLSKGMQDFNYLHTNCFEITLELSCDKFPPEEELQREWLGNREALIQFLEQVHQGIKGMVLDENYNNLANAVISVSGINHDVTSGDHGDYFRLLLPGIYTVSATAPGYDPETVTVTVGPAEPTLVNFHLKRSGSSGGSSGGSSGDAHKSEVAHRFKDLGEENFKALVLIAFAQYLQQCPFEDHVKLVNEVTEFAKTCVADESAENCDKSLHTLFGDKLCTVATLRETYGEMADCCAKQEPERNECFLQHKDDNPNLPRLVRPEVDVMCTAFHDNEETFLKKYLYEIARRHPYFYAPELLFFAKRYKAAFTECCQAADKAACLLPKLDELRDEGKASSAKQRLKCASLQKFGERAFKAWAVARLSQRFPKAEFAEVSKLVTDLTKVHTECCHGDLLECADDRADLAKYICENQDSISSKLKECCEKPLLEKSHCIAEVENDEMPADLPSLAADFVESKDVCKNYAEAKDVFLGMFLYEYARRHPDYSVVLLLRLAKTYETTLEKCCAAADPHECYAKVFDEFKPLVEEPQNLIKQNCELFEQLGEYKFQNALLVRYTKKVPQVSTPTLVEVSRNLGKVGSKCCKHPEAKRMPCAEDYLSVVLNQLCVLHEKTPVSDRVTKCCTESLVNRRPCFSALEVDETYVPKEFNAETFTFHADICTLSEKERQIKKQTALVELVKHKPKATKEQLKAVMDDFAAFVEKCCKADDKETCFAEEGKKLVAASQAALGL

SEQ ID NO: 401 - protein, 995 aa, Artificial Sequence; identical to SEQ ID NO: 234
  hCPN1 variant

SEQ ID NO: 402 - protein, 995 aa, Artificial Sequence
  hCPN1 variant
VTFRHHRYDDLVRTLYKVQNECPGITRVYSIGRSVEGRHLYVLEFSDHPGIHEPLEPEVKYVGNMHGNEALGRELMLQLSEFLCEEFRNRNQRIVQLIQDTRIHILPSMNPDGYEVAAAQGPAKPGYLVGRNNANGVDLNRNFPDLNTYIYYNEKYGGPNHHLPLPDNWKSQVEPETRAVIRWMHSFNFVLSANLHGGAVVANYPYDKSFEHRVRGVRRTASTPTPDDKLFQKLAKVYSYAHGWMFQGWNCGDYFPDGITNGASWYSLSKGMQDFNYLHTNCFEITLELSCDKFPPEEELQREWLGNREALIQFLEQVHQGIKGMVLDENYNNLANAVISVSGINHDVTSGDHGDYFRLLLPGIYTVSATAPGYDPETVTVTVGPAEPTLVNFHLKRSGSSGGSSGGSSGDAHKSEVAHRFKDLGEENFKALVLIAFAQYLQQCPFEDHVKLVNEVTEFAKTCVADESAENCDKSLHTLFGDKLCTVATLRETYGEMADCCAKQEPERNECFLQHKDDNPNLPRLVRPEVDVMCTAFHDNEETFLKKYLYEIARRHPYFYAPELLFFAKRYKAAFTECCQAADKAACLLPKLDELRDEGKASSAKQRLKCASLQKFGERAFKAWAVARLSQRFPKAEFAEVSKLVTDLTKVHTECCHGDLLECADDRADLAKYICENQDSISSKLKECCEKPLLEKSHCIAEVENDEMPADLPSLAADFVESKDVCKNYAEAKDVFLGMFLYEYARRHPDYSVVLLLRLAKTYETTLEKCCAAADPHECYAKVFDEFKPLVEEPQNLIKQNCELFEQLGEYKFQNALLVRYTKKVPQVSTPTLVEVSRNLGKVGSKCCKHPEAKRMPCAEDYLSVVLNQLCVLHEKTPVSDRVTKCCTESLVNRRPCFSALEVDETYVPKEFNAETFTFHADICTLSEKERQIKKQTALVELVKHKPKATKEQLKAVMDDFAAFVEKCCKADDKETCFAEEGKKLVAASQAALGL

SEQ ID NO: 403 - protein, 995 aa, Artificial Sequence
  hCPN1 variant
VTFRHHRYDDLVRTLYKVQNECPGITRVYSIGRSVEGRHLYVLEFSDHPGIHEPLEPEVKYVGNMHGNEALGRELMLQLSEFLCEEFRNRNQRIVQLIQDTRIHILPSMNPDGYEVAAAQGPNAPGYLVGRNNANGVDLNRNFPDLNTYIYYNEKYGGPNHHLPLPDNWKSQVEPETRAVIRWMHSFNFVLSANLHGGAVVANYPYDKSFEHRVRGVRRTASTPTPDDKLFQKLAKVYSYAHGWMFQGWNCGDYFPDGITNGASWYSLSKGMQDFNYLHTNCFEITLELSCDKFPPEEELQREWLGNREALIQFLEQVHQGIKGMVLDENYNNLANAVISVSGINHDVTSGDHGDYFRLLLPGIYTVSATAPGYDPETVTVTVGPAEPTLVNFHLKRSGSSGGSSGGSSGDAHKSEVAHRFKDLGEENFKALVLIAFAQYLQQCPFEDHVKLVNEVTEFAKTCVADESAENCDKSLHTLFGDKLCTVATLRETYGEMADCCAKQEPERNECFLQHKDDNPNLPRLVRPEVDVMCTAFHDNEETFLKKYLYEIARRHPYFYAPELLFFAKRYKAAFTECCQAADKAACLLPKLDELRDEGKASSAKQRLKCASLQKFGERAFKAWAVARLSQRFPKAEFAEVSKLVTDLTKVHTECCHGDLLECADDRADLAKYICENQDSISSKLKECCEKPLLEKSHCIAEVENDEMPADLPSLAADFVESKDVCKNYAEAKDVFLGMFLYEYARRHPDYSVVLLLRLAKTYETTLEKCCAAADPHECYAKVFDEFKPLVEEPQNLIKQNCELFEQLGEYKFQNALLVRYTKKVPQVSTPTLVEVSRNLGKVGSKCCKHPEAKRMPCAEDYLSVVLNQLCVLHEKTPVSDRVTKCCTESLVNRRPCFSALEVDETYVPKEFNAETFTFHADICTLSEKERQIKKQTALVELVKHKPKATKEQLKAVMDDFAAFVEKCCKADDKETCFAEEGKKLVAASQAALGL

SEQ ID NO: 404 - protein, 995 aa, Artificial Sequence
  hCPN1 variant
VTFRHHRYDDLVRTLYKVQNECPGITRVYSIGRSVEGRHLYVLEFSDHPGIHEPLEPEVKYVGNMHGNEALGRELMLQLSEFLCEEFRNRNQRIVQLIQDTRIHILPSMNPDGYEVAAAQGPNKAGYLVGRNNANGVDLNRNFPDLNTYIYYNEKYGGPNHHLPLPDNWKSQVEPETRAVIRWMHSFNFVLSANLHGGAVVANYPYDKSFEHRVRGVRRTASTPTPDDKLFQKLAKVYSYAHGWMFQGWNCGDYFPDGITNGASWYSLSKGMQDFNYLHTNCFEITLELSCDKFPPEEELQREWLGNREALIQFLEQVHQGIKGMVLDENYNNLANAVISVSGINHDVTSGDHGDYFRLLLPGIYTVSATAPGYDPETVTVTVGPAEPTLVNFHLKRSGSSGGSSGGSSGDAHKSEVAHRFKDLGEENFKALVLIAFAQYLQQCPFEDHVKLVNEVTEFAKTCVADESAENCDKSLHTLFGDKLCTVATLRETYGEMADCCAKQEPERNECFLQHKDDNPNLPRLVRPEVDVMCTAFHDNEETFLKKYLYEIARRHPYFYAPELLFFAKRYKAAFTECCQAADKAACLLPKLDELRDEGKASSAKQRLKCASLQKFGERAFKAWAVARLSQRFPKAEFAEVSKLVTDLTKVHTECCHGDLLECADDRADLAKYICENQDSISSKLKECCEKPLLEKSHCIAEVENDEMPADLPSLAADFVESKDVCKNYAEAKDVFLGMFLYEYARRHPDYSVVLLLRLAKTYETTLEKCCAAADPHECYAKVFDEFKPLVEEPQNLIKQNCELFEQLGEYKFQNALLVRYTKKVPQVSTPTLVEVSRNLGKVGSKCCKHPEAKRMPCAEDYLSVVLNQLCVLHEKTPVSDRVTKCCTESLVNRRPCFSALEVDETYVPKEFNAETFTFHADICTLSEKERQIKKQTALVELVKHKPKATKEQLKAVMDDFAAFVEKCCKADDKETCFAEEGKKLVAASQAALGL

SEQ ID NO: 405 - protein, 995 aa, Artificial Sequence
  hCPN1 variant
VTFRHHRYDDLVRTLYKVQNECPGITRVYSIGRSVEGRHLYVLEFSDHPGIHEPLEPEVKYVGNMHGNEALGRELMLQLSEFLCEEFRNRNQRIVQLIQDTRIHILPSMNPDGYEVAAAQGPNKPGYLVGRNNANGVALNRNFPDLNTYIYYNEKYGGPNHHLPLPDNWKSQVEPETRAVIRWMHSFNFVLSANLHGGAVVANYPYDKSFEHRVRGVRRTASTPTPDDKLFQKLAKVYSYAHGWMFQGWNCGDYFPDGITNGASWYSLSKGMQDFNYLHTNCFEITLELSCDKFPPEEELQREWLGNREALIQFLEQVHQGIKGMVLDENYNNLANAVISVSGINHDVTSGDHGDYFRLLLPGIYTVSATAPGYDPETVTVTVGPAEPTLVNFHLKRSGSSGGSSGGSSGDAHKSEVAHRFKDLGEENFKALVLIAFAQYLQQCPFEDHVKLVNEVTEFAKTCVADESAENCDKSLHTLFGDKLCTVATLRETYGEMADCCAKQEPERNECFLQHKDDNPNLPRLVRPEVDVMCTAFHDNEETFLKKYLYEIARRHPYFYAPELLFFAKRYKAAFTECCQAADKAACLLPKLDELRDEGKASSAKQRLKCASLQKFGERAFKAWAVARLSQRFPKAEFAEVSKLVTDLTKVHTECCHGDLLECADDRADLAKYICENQDSISSKLKECCEKPLLEKSHCIAEVENDEMPADLPSLAADFVESKDVCKNYAEAKDVFLGMFLYEYARRHPDYSVVLLLRLAKTYETTLEKCCAAADPHECYAKVFDEFKPLVEEPQNLIKQNCELFEQLGEYKFQNALLVRYTKKVPQVSTPTLVEVSRNLGKVGSKCCKHPEAKRMPCAEDYLSVVLNQLCVLHEKTPVSDRVTKCCTESLVNRRPCFSALEVDETYVPKEFNAETFTFHADICTLSEKERQIKKQTALVELVKHKPKATKEQLKAVMDDFAAFVEKCCKADDKETCFAEEGKKLVAASQAALGL

SEQ ID NO: 406 - protein, 995 aa, Artificial Sequence
  hCPN1 variant
VTFRHHRYDDLVRTLYKVQNECPGITRVYSIGRSVEGRHLYVLEFSDHPGIHEPLEPEVKYVGNMHGNEALGRELMLQLSEFLCEEFRNRNQRIVQLIQDTRIHILPSMNPDGYEVAAAQGPNKPGYLVGRNNANGVDLNRNFPDLNTYIYYNEKYGGPNHHLPLPDNWKSQVEPETRAAIRWMHSFNFVLSANLHGGAVVANYPYDKSFEHRVRGVRRTASTPTPDDKLFQKLAKVYSYAHGWMFQGWNCGDYFPDGITNGASWYSLSKGMQDFNYLHTNCFEITLELSCDKFPPEEELQREWLGNREALIQFLEQVHQGIKGMVLDENYNNLANAVISVSGINHDVTSGDHGDYFRLLLPGIYTVSATAPGYDPETVTVTVGPAEPTLVNFHLKRSGSSGGSSGGSSGDAHKSEVAHRFKDLGEENFKALVLIAFAQYLQQCPFEDHVKLVNEVTEFAKTCVADESAENCDKSLHTLFGDKLCTVATLRETYGEMADCCAKQEPERNECFLQHKDDNPNLPRLVRPEVDVMCTAFHDNEETFLKKYLYEIARRHPYFYAPELLFFAKRYKAAFTECCQAADKAACLLPKLDELRDEGKASSAKQRLKCASLQKFGERAFKAWAVARLSQRFPKAEFAEVSKLVTDLTKVHTECCHGDLLECADDRADLAKYICENQDSISSKLKECCEKPLLEKSHCIAEVENDEMPADLPSLAADFVESKDVCKNYAEAKDVFLGMFLYEYARRHPDYSVVLLLRLAKTYETTLEKCCAAADPHECYAKVFDEFKPLVEEPQNLIKQNCELFEQLGEYKFQNALLVRYTKKVPQVSTPTLVEVSRNLGKVGSKCCKHPEAKRMPCAEDYLSVVLNQLCVLHEKTPVSDRVTKCCTESLVNRRPCFSALEVDETYVPKEFNAETFTFHADICTLSEKERQIKKQTALVELVKHKPKATKEQLKAVMDDFAAFVEKCCKADDKETCFAEEGKKLVAASQAALGL

SEQ ID NO: 407 - protein, 995 aa, Artificial Sequence
  hCPN1 variant
VTFRHHRYDDLVRTLYKVQNECPGITRVYSIGRSVEGRHLYVLEFSDHPGIHEPLEPEVKYVGNMHGNEALGRELMLQLSEFLCEEFRNRNQRIVQLIQDTRIHILPSMNPDGYEVAAAQGPNKPGYLVGRNNANGVDLNRNFPDLNTYIYYNEKYGGPNHHLPLPDNWKSQVEPETRAVIRWMHSFNAVLSANLHGGAVVANYPYDKSFEHRVRGVRRTASTPTPDDKLFQKLAKVYSYAHGWMFQGWNCGDYFPDGITNGASWYSLSKGMQDFNYLHTNCFEITLELSCDKFPPEEELQREWLGNREALIQFLEQVHQGIKGMVLDENYNNLANAVISVSGINHDVTSGDHGDYFRLLLPGIYTVSATAPGYDPETVTVTVGPAEPTLVNFHLKRSGSSGGSSGGSSGDAHKSEVAHRFKDLGEENFKALVLIAFAQYLQQCPFEDHVKLVNEVTEFAKTCVADESAENCDKSLHTLFGDKLCTVATLRETYGEMADCCAKQEPERNECFLQHKDDNPNLPRLVRPEVDVMCTAFHDNEETFLKKYLYEIARRHPYFYAPELLFFAKRYKAAFTECCQAADKAACLLPKLDELRDEGKASSAKQRLKCASLQKFGERAFKAWAVARLSQRFPKAEFAEVSKLVTDLTKVHTECCHGDLLECADDRADLAKYICENQDSISSKLKECCEKPLLEKSHCIAEVENDEMPADLPSLAADFVESKDVCKNYAEAKDVFLGMFLYEYARRHPDYSVVLLLRLAKTYETTLEKCCAAADPHECYAKVFDEFKPLVEEPQNLIKQNCELFEQLGEYKFQNALLVRYTKKVPQVSTPTLVEVSRNLGKVGSKCCKHPEAKRMPCAEDYLSVVLNQLCVLHEKTPVSDRVTKCCTESLVNRRPCFSALEVDETYVPKEFNAETFTFHADICTLSEKERQIKKQTALVELVKHKPKATKEQLKAVMDDFAAFVEKCCKADDKETCFAEEGKKLVAASQAALGL

SEQ ID NO: 408 - protein, 995 aa, Artificial Sequence; identical to SEQ ID NO: 9
  hCPN1 variant

SEQ ID NO: 409 - protein, 995 aa, Artificial Sequence
  hCPN1 variant
VTFRHHRYDDLVRTLYKVQNECPGITRVYSIGRSVEGRHLYVLEFSDHPGIHEPLEPEVKYVGNMHGNEALGRELMLQLSEFLCEEFRNRNQRIVQLIQDTRIHILPSMNPDGYEVAAAQGPNKPGYLVGRNNANGVDLNRNFPDLNTYIYYNEKYGGPNHHLPLPDNWKSQVEPETRAVIRWMHSFNFVLSANLHGGAVVANYPYDKSFEHRVRGVRRTASTPTPDDKLFQKLAKVYSYAHGWMFQGWNCGDYFPDGITNGASWYSLSKGMQDFAYLHTNCFEITLELSCDKFPPEEELQREWLGNREALIQFLEQVHQGIKGMVLDENYNNLANAVISVSGINHDVTSGDHGDYFRLLLPGIYTVSATAPGYDPETVTVTVGPAEPTLVNFHLKRSGSSGGSSGGSSGDAHKSEVAHRFKDLGEENFKALVLIAFAQYLQQCPFEDHVKLVNEVTEFAKTCVADESAENCDKSLHTLFGDKLCTVATLRETYGEMADCCAKQEPERNECFLQHKDDNPNLPRLVRPEVDVMCTAFHDNEETFLKKYLYEIARRHPYFYAPELLFFAKRYKAAFTECCQAADKAACLLPKLDELRDEGKASSAKQRLKCASLQKFGERAFKAWAVARLSQRFPKAEFAEVSKLVTDLTKVHTECCHGDLLECADDRADLAKYICENQDSISSKLKECCEKPLLEKSHCIAEVENDEMPADLPSLAADFVESKDVCKNYAEAKDVFLGMFLYEYARRHPDYSVVLLLRLAKTYETTLEKCCAAADPHECYAKVFDEFKPLVEEPQNLIKQNCELFEQLGEYKFQNALLVRYTKKVPQVSTPTLVEVSRNLGKVGSKCCKHPEAKRMPCAEDYLSVVLNQLCVLHEKTPVSDRVTKCCTESLVNRRPCFSALEVDETYVPKEFNAETFTFHADICTLSEKERQIKKQTALVELVKHKPKATKEQLKAVMDDFAAFVEKCCKADDKETCFAEEGKKLVAASQAALGL

SEQ ID NO: 410 - protein, 995 aa, Artificial Sequence
  hCPN1 variant
VTFRHHRYDDLVRTLYKVQNECPGITRVYSIGRSVEGRHLYVLEFSDHPGIHEPLEPEVKYVGNMHGNEALGRELMLQLSEFLCEEFRNRNQRIVQLIQDTRIHILPSMNPDGYEVAAAQGPNKPGYLVGRNNANGVDLNRNFPDLNTYIYYNEKYGGPNHHLPLPDNWKSQVEPETRAVIRWMHSFNFVLSANLHGGAVVANYPYDKSFEHRVRGVRRTASTPTPDDKLFQKLAKVYSYAHGWMFQGWNCGDYFPDGITNGASWYSLSKGMQDFNYLHTNCFAITLELSCDKFPPEEELQREWLGNREALIQFLEQVHQGIKGMVLDENYNNLANAVISVSGINHDVTSGDHGDYFRLLLPGIYTVSATAPGYDPETVTVTVGPAEPTLVNFHLKRSGSSGGSSGGSSGDAHKSEVAHRFKDLGEENFKALVLIAFAQYLQQCPFEDHVKLVNEVTEFAKTCVADESAENCDKSLHTLFGDKLCTVATLRETYGEMADCCAKQEPERNECFLQHKDDNPNLPRLVRPEVDVMCTAFHDNEETFLKKYLYEIARRHPYFYAPELLFFAKRYKAAFTECCQAADKAACLLPKLDELRDEGKASSAKQRLKCASLQKFGERAFKAWAVARLSQRFPKAEFAEVSKLVTDLTKVHTECCHGDLLECADDRADLAKYICENQDSISSKLKECCEKPLLEKSHCIAEVENDEMPADLPSLAADFVESKDVCKNYAEAKDVFLGMFLYEYARRHPDYSVVLLLRLAKTYETTLEKCCAAADPHECYAKVFDEFKPLVEEPQNLIKQNCELFEQLGEYKFQNALLVRYTKKVPQVSTPTLVEVSRNLGKVGSKCCKHPEAKRMPCAEDYLSVVLNQLCVLHEKTPVSDRVTKCCTESLVNRRPCFSALEVDETYVPKEFNAETFTFHADICTLSEKERQIKKQTALVELVKHKPKATKEQLKAVMDDFAAFVEKCCKADDKETCFAEEGKKLVAASQAALGL

SEQ ID NO: 411 - protein, 995 aa, Artificial Sequence
  hCPN1 variant
VTFRHHRYDDLVRTLYKVQNECPGITRVYSIGRSVEGRHLYVLEFSDHPGIHEPLEPEVKYVGNMHGNEALGRELMLQLSEFLCEEFRNRNQRIVQLIQDTRIHILPSMNPDGYEVAAAQGPNKPGYLVGRNNANGVDLNRNFPDLNTYIYYNEKYGGPNHHLPLPDNWKSQVEPETRAVIRWMHSFNFVLSANLHGGAVVANYPYDKSFEHRVRGVRRTASTPTPDDKLFQKLAKVYSYAHGWMFQGWNCGDYFPDGITNGASWYSLSKGMQDFNYLHTNCFEITLELSCDKFPPAEELQREWLGNREALIQFLEQVHQGIKGMVLDENYNNLANAVISVSGINHDVTSGDHGDYFRLLLPGIYTVSATAPGYDPETVTVTVGPAEPTLVNFHLKRSGSSGGSSGGSSGDAHKSEVAHRFKDLGEENFKALVLIAFAQYLQQCPFEDHVKLVNEVTEFAKTCVADESAENCDKSLHTLFGDKLCTVATLRETYGEMADCCAKQEPERNECFLQHKDDNPNLPRLVRPEVDVMCTAFHDNEETFLKKYLYEIARRHPYFYAPELLFFAKRYKAAFTECCQAADKAACLLPKLDELRDEGKASSAKQRLKCASLQKFGERAFKAWAVARLSQRFPKAEFAEVSKLVTDLTKVHTECCHGDLLECADDRADLAKYICENQDSISSKLKECCEKPLLEKSHCIAEVENDEMPADLPSLAADFVESKDVCKNYAEAKDVFLGMFLYEYARRHPDYSVVLLLRLAKTYETTLEKCCAAADPHECYAKVFDEFKPLVEEPQNLIKQNCELFEQLGEYKFQNALLVRYTKKVPQVSTPTLVEVSRNLGKVGSKCCKHPEAKRMPCAEDYLSVVLNQLCVLHEKTPVSDRVTKCCTESLVNRRPCFSALEVDETYVPKEFNAETFTFHADICTLSEKERQIKKQTALVELVKHKPKATKEQLKAVMDDFAAFVEKCCKADDKETCFAEEGKKLVAASQAALGL

SEQ ID NO: 412 - protein, 995 aa, Artificial Sequence
  hCPN1 variant
VTFRHHRYDDLVRTLYKVQNECPGITRVYSIGRSVEGRHLYVLEFSDHPGIHEPLEPEVKYVGNMHGNEALGRELMLQLSEFLCEEFRNRNQRIVQLIQDTRIHILPSMNPDGYEVAAAQGPNKPGYLVGRNNANGVDLNRNFPDLNTYIYYNEKYGGPNHHLPLPDNWKSQVEPETRAVIRWMHSFNFVLSANLHGGAVVANYPYDKSFEHRVRGVRRTASTPTPDDKLFQKLAKVYSYAHGWMFQGWNCGDYFPDGITNGASWYSLSKGMQDFNYLHTNCFEITLELSCDKFPPEEEAQREWLGNREALIQFLEQVHQGIKGMVLDENYNNLANAVISVSGINHDVTSGDHGDYFRLLLPGIYTVSATAPGYDPETVTVTVGPAEPTLVNFHLKRSGSSGGSSGGSSGDAHKSEVAHRFKDLGEENFKALVLIAFAQYLQQCPFEDHVKLVNEVTEFAKTCVADESAENCDKSLHTLFGDKLCTVATLRETYGEMADCCAKQEPERNECFLQHKDDNPNLPRLVRPEVDVMCTAFHDNEETFLKKYLYEIARRHPYFYAPELLFFAKRYKAAFTECCQAADKAACLLPKLDELRDEGKASSAKQRLKCASLQKFGERAFKAWAVARLSQRFPKAEFAEVSKLVTDLTKVHTECCHGDLLECADDRADLAKYICENQDSISSKLKECCEKPLLEKSHCIAEVENDEMPADLPSLAADFVESKDVCKNYAEAKDVFLGMFLYEYARRHPDYSVVLLLRLAKTYETTLEKCCAAADPHECYAKVFDEFKPLVEEPQNLIKQNCELFEQLGEYKFQNALLVRYTKKVPQVSTPTLVEVSRNLGKVGSKCCKHPEAKRMPCAEDYLSVVLNQLCVLHEKTPVSDRVTKCCTESLVNRRPCFSALEVDETYVPKEFNAETFTFHADICTLSEKERQIKKQTALVELVKHKPKATKEQLKAVMDDFAAFVEKCCKADDKETCFAEEGKKLVAASQAALGL

SEQ ID NO: 413 - protein, 995 aa, Artificial Sequence
  hCPN1 variant
VTFRHHRYDDLVRTLYKVQNECPGITRVYSIGRSVEGRHLYVLEFSDHPGIHEPLEPEVKYVGNMHGNEALGRELMLQLSEFLCEEFRNRNQRIVQLIQDTRIHILPSMNPDGYEVAAAQGPNKPGYLVGRNNANGVDLNRNFPDLNTYIYYNEKYGGPNHHLPLPDNWKSQVEPETRAVIRWMHSFNFVLSANLHGGAVVANYPYDKSFEHRVRGVRRTASTPTPDDKLFQKLAKVYSYAHGWMFQGWNCGDYFPDGITNGASWYSLSKGMQDFNYLHTNCFEITLELSCDKFPPEEELAREWLGNREALIQFLEQVHQGIKGMVLDENYNNLANAVISVSGINHDVTSGDHGDYFRLLLPGIYTVSATAPGYDPETVTVTVGPAEPTLVNFHLKRSGSSGGSSGGSSGDAHKSEVAHRFKDLGEENFKALVLIAFAQYLQQCPFEDHVKLVNEVTEFAKTCVADESAENCDKSLHTLFGDKLCTVATLRETYGEMADCCAKQEPERNECFLQHKDDNPNLPRLVRPEVDVMCTAFHDNEETFLKKYLYEIARRHPYFYAPELLFFAKRYKAAFTECCQAADKAACLLPKLDELRDEGKASSAKQRLKCASLQKFGERAFKAWAVARLSQRFPKAEFAEVSKLVTDLTKVHTECCHGDLLECADDRADLAKYICENQDSISSKLKECCEKPLLEKSHCIAEVENDEMPADLPSLAADFVESKDVCKNYAEAKDVFLGMFLYEYARRHPDYSVVLLLRLAKTYETTLEKCCAAADPHECYAKVFDEFKPLVEEPQNLIKQNCELFEQLGEYKFQNALLVRYTKKVPQVSTPTLVEVSRNLGKVGSKCCKHPEAKRMPCAEDYLSVVLNQLCVLHEKTPVSDRVTKCCTESLVNRRPCFSALEVDETYVPKEFNAETFTFHADICTLSEKERQIKKQTALVELVKHKPKATKEQLKAVMDDFAAFVEKCCKADDKETCFAEEGKKLVAASQAALGL

SEQ ID NO: 414 - protein, 995 aa, Artificial Sequence
  hCPN1 variant
VTFRHHRYDDLVRTLYKVQNECPGITRVYSIGRSVEGRHLYVLEFSDHPGIHEPLEPEVAYVGNMHGNEALGRELMLQLSEFLCEEFRNRNQRIVQLIQDTRIHILPSMNPDGYEVAAAQGPNKPGYLVGRNNANGVDLNRNFPDLNTYIYYNEKYGGPNHHLPLPDNWKSQVEPETRAVIRWMHSFNFVLSANLHGGAVVANYPYDKSFEHRVRGVRRTASTPTPDDKLFQKLAKVYSYAHGWMFQGWNCGDYFPDGITNGASWYSLSKGMQDFNYLHTNCFEITLELSCDKFPPEEELQREWLGNREALIQFLEQVHQGIKGMVLDENYNNLANAVISVSGINHDVTSGDHGDYFRLLLPGIYTVSATAPGYDPETVTVTVGPAEPTLVNFHLKRSGSSGGSSGGSSGDAHKSEVAHRFKDLGEENFKALVLIAFAQYLQQCPFEDHVKLVNEVTEFAKTCVADESAENCDKSLHTLFGDKLCTVATLRETYGEMADCCAKQEPERNECFLQHKDDNPNLPRLVRPEVDVMCTAFHDNEETFLKKYLYEIARRHPYFYAPELLFFAKRYKAAFTECCQAADKAACLLPKLDELRDEGKASSAKQRLKCASLQKFGERAFKAWAVARLSQRFPKAEFAEVSKLVTDLTKVHTECCHGDLLECADDRADLAKYICENQDSISSKLKECCEKPLLEKSHCIAEVENDEMPADLPSLAADFVESKDVCKNYAEAKDVFLGMFLYEYARRHPDYSVVLLLRLAKTYETTLEKCCAAADPHECYAKVFDEFKPLVEEPQNLIKQNCELFEQLGEYKFQNALLVRYTKKVPQVSTPTLVEVSRNLGKVGSKCCKHPEAKRMPCAEDYLSVVLNQLCVLHEKTPVSDRVTKCCTESLVNRRPCFSALEVDETYVPKEFNAETFTFHADICTLSEKERQIKKQTALVELVKHKPKATKEQLKAVMDDFAAFVEKCCKADDKETCFAEEGKKLVAASQAALGL

SEQ ID NO: 415 - protein, 995 aa, Artificial Sequence
  hCPN1 variant
VTFRHHRYDDLVRTLYKVQNECPGITRVYSIGRSVEGRHLYVLEFSDHPGIHEPLEPEVKYVGNMAGNEALGRELMLQLSEFLCEEFRNRNQRIVQLIQDTRIHILPSMNPDGYEVAAAQGPNKPGYLVGRNNANGVDLNRNFPDLNTYIYYNEKYGGPNHHLPLPDNWKSQVEPETRAVIRWMHSFNFVLSANLHGGAVVANYPYDKSFEHRVRGVRRTASTPTPDDKLFQKLAKVYSYAHGWMFQGWNCGDYFPDGITNGASWYSLSKGMQDFNYLHTNCFEITLELSCDKFPPEEELQREWLGNREALIQFLEQVHQGIKGMVLDENYNNLANAVISVSGINHDVTSGDHGDYFRLLLPGIYTVSATAPGYDPETVTVTVGPAEPTLVNFHLKRSGSSGGSSGGSSGDAHKSEVAHRFKDLGEENFKALVLIAFAQYLQQCPFEDHVKLVNEVTEFAKTCVADESAENCDKSLHTLFGDKLCTVATLRETYGEMADCCAKQEPERNECFLQHKDDNPNLPRLVRPEVDVMCTAFHDNEETFLKKYLYEIARRHPYFYAPELLFFAKRYKAAFTECCQAADKAACLLPKLDELRDEGKASSAKQRLKCASLQKFGERAFKAWAVARLSQRFPKAEFAEVSKLVTDLTKVHTECCHGDLLECADDRADLAKYICENQDSISSKLKECCEKPLLEKSHCIAEVENDEMPADLPSLAADFVESKDVCKNYAEAKDVFLGMFLYEYARRHPDYSVVLLLRLAKTYETTLEKCCAAADPHECYAKVFDEFKPLVEEPQNLIKQNCELFEQLGEYKFQNALLVRYTKKVPQVSTPTLVEVSRNLGKVGSKCCKHPEAKRMPCAEDYLSVVLNQLCVLHEKTPVSDRVTKCCTESLVNRRPCFSALEVDETYVPKEFNAETFTFHADICTLSEKERQIKKQTALVELVKHKPKATKEQLKAVMDDFAAFVEKCCKADDKETCFAEEGKKLVAASQAALGL

SEQ ID NO: 416 - protein, 995 aa, Artificial Sequence
  hCPN1 variant
VTFRHHRYDDLVRTLYKVQNECPGITRVYSIGRSVEGRHLYVLEFSDHPGIHEPLEPEVKYVGNMHGNEALGRELMLALSEFLCEEFRNRNQRIVQLIQDTRIHILPSMNPDGYEVAAAQGPNKPGYLVGRNNANGVDLNRNFPDLNTYIYYNEKYGGPNHHLPLPDNWKSQVEPETRAVIRWMHSFNFVLSANLHGGAVVANYPYDKSFEHRVRGVRRTASTPTPDDKLFQKLAKVYSYAHGWMFQGWNCGDYFPDGITNGASWYSLSKGMQDFNYLHTNCFEITLELSCDKFPPEEELQREWLGNREALIQFLEQVHQGIKGMVLDENYNNLANAVISVSGINHDVTSGDHGDYFRLLLPGIYTVSATAPGYDPETVTVTVGPAEPTLVNFHLKRSGSSGGSSGGSSGDAHKSEVAHRFKDLGEENFKALVLIAFAQYLQQCPFEDHVKLVNEVTEFAKTCVADESAENCDKSLHTLFGDKLCTVATLRETYGEMADCCAKQEPERNECFLQHKDDNPNLPRLVRPEVDVMCTAFHDNEETFLKKYLYEIARRHPYFYAPELLFFAKRYKAAFTECCQAADKAACLLPKLDELRDEGKASSAKQRLKCASLQKFGERAFKAWAVARLSQRFPKAEFAEVSKLVTDLTKVHTECCHGDLLECADDRADLAKYICENQDSISSKLKECCEKPLLEKSHCIAEVENDEMPADLPSLAADFVESKDVCKNYAEAKDVFLGMFLYEYARRHPDYSVVLLLRLAKTYETTLEKCCAAADPHECYAKVFDEFKPLVEEPQNLIKQNCELFEQLGEYKFQNALLVRYTKKVPQVSTPTLVEVSRNLGKVGSKCCKHPEAKRMPCAEDYLSVVLNQLCVLHEKTPVSDRVTKCCTESLVNRRPCFSALEVDETYVPKEFNAETFTFHADICTLSEKERQIKKQTALVELVKHKPKATKEQLKAVMDDFAAFVEKCCKADDKETCFAEEGKKLVAASQAALGL

SEQ ID NO: 417 - protein, 995 aa, Artificial Sequence
  hCPN1 variant
VTFRHHRYDDLVRTLYKVQNECPGITRVYSIGRSVEGRHLYVLEFSDHPGIHEPLEPEVFYVGNMHGNEALGRELMLQLSEFLCEEFRNRNQRIVQLIQDTRIHILPSMNPDGYEVAAAQGPNKPGYLVGRNNANGVDLNRNFPDLNTYIYYNEKYGGPNHHLPLPDNWKSQVEPETRAFIRWMHSFNFVLAANLHGGAVVANYPYDKSFEHRVRGVRRTASTPTPDDKLFQKLAKVYSYAHGWMFQGWNCGDYFPDGITNGASWYSLSKGMQDFVYLHTNCFIITLELSCDKFPPEEELQREWLGNREALIQFLEQVHQGIKGMVLDENYNNLANAVISVSGINHDVTSGDHGDYFRLLLPGIYTVSATAPGYDPETVTVTVGPAEPTLVNFHLKRSGSSGGSSGGSSGDAHKSEVAHRFKDLGEENFKALVLIAFAQYLQQCPFEDHVKLVNEVTEFAKTCVADESAENCDKSLHTLFGDKLCTVATLRETYGEMADCCAKQEPERNECFLQHKDDNPNLPRLVRPEVDVMCTAFHDNEETFLKKYLYEIARRHPYFYAPELLFFAKRYKAAFTECCQAADKAACLLPKLDELRDEGKASSAKQRLKCASLQKFGERAFKAWAVARLSQRFPKAEFAEVSKLVTDLTKVHTECCHGDLLECADDRADLAKYICENQDSISSKLKECCEKPLLEKSHCIAEVENDEMPADLPSLAADFVESKDVCKNYAEAKDVFLGMFLYEYARRHPDYSVVLLLRLAKTYETTLEKCCAAADPHECYAKVFDEFKPLVEEPQNLIKQNCELFEQLGEYKFQNALLVRYTKKVPQVSTPTLVEVSRNLGKVGSKCCKHPEAKRMPCAEDYLSVVLNQLCVLHEKTPVSDRVTKCCTESLVNRRPCFSALEVDETYVPKEFNAETFTFHADICTLSEKERQIKKQTALVELVKHKPKATKEQLKAVMDDFAAFVEKCCKADDKETCFAEEGKKLVAASQAALGL

SEQ ID NO: 418 - protein, 995 aa, Artificial Sequence
  hCPN1 variant
VTFRHHRYDDLVRTLYKVQNECPGITRVYSIGRSVEGRHLYVLEFSDHPGIHEPLEPEVFYVGNMHGNEVLGRELMLQLSEFLCEEFRNRNQRIVQLIQDTRIHILPSMNPDGYEVAAAQGPNKPGYLVGRNNANGVDLNRNFPDLNTYIYYNEKYGGPNHHLPLPDNWKSQVEPETRAFIRWMHSFNFVLAANLHGGAVVANYPYDKSFEHRVRGVRRTASTPTPDDKLFQKLAKVYSYAHGWMFQGWNCGDYFPDGITNGASWYSLSKGMQDFVYLHTNCFEITLELSCDKFPPEEELQREWLGNREALIQFLEQVHQGIKGMVLDENYNNLANAVISVSGINHDVTSGDHGDYFRLLLPGIYTVSATAPGYDPETVTVTVGPAEPTLVNFHLKRSGSSGGSSGGSSGDAHKSEVAHRFKDLGEENFKALVLIAFAQYLQQCPFEDHVKLVNEVTEFAKTCVADESAENCDKSLHTLFGDKLCTVATLRETYGEMADCCAKQEPERNECFLQHKDDNPNLPRLVRPEVDVMCTAFHDNEETFLKKYLYEIARRHPYFYAPELLFFAKRYKAAFTECCQAADKAACLLPKLDELRDEGKASSAKQRLKCASLQKFGERAFKAWAVARLSQRFPKAEFAEVSKLVTDLTKVHTECCHGDLLECADDRADLAKYICENQDSISSKLKECCEKPLLEKSHCIAEVENDEMPADLPSLAADFVESKDVCKNYAEAKDVFLGMFLYEYARRHPDYSVVLLLRLAKTYETTLEKCCAAADPHECYAKVFDEFKPLVEEPQNLIKQNCELFEQLGEYKFQNALLVRYTKKVPQVSTPTLVEVSRNLGKVGSKCCKHPEAKRMPCAEDYLSVVLNQLCVLHEKTPVSDRVTKCCTESLVNRRPCFSALEVDETYVPKEFNAETFTFHADICTLSEKERQIKKQTALVELVKHKPKATKEQLKAVMDDFAAFVEKCCKADDKETCFAEEGKKLVAASQAALGL

SEQ ID NO: 419 - protein, 995 aa, Artificial Sequence
  hCPN1 variant
VTFRHHRYDDLVRTLYKVQNECPGITRVYSIGRSVEGRHLYVLEFSDHPGIHEPLEPEVFYVGNMHGDEALGRELMLQLSEFLCEEFRNRNQRIVQLIQDTRIHILPSMNPDGYEVAAAQGPNKSGYLVGRNNANGVDLNRNFPDLNTYIYYNEKYGGPNHHLPLPDNWKSQVEPETRAFIRWMHSFNFVLAANLHGGAVVANYPYDKSFEHRVRGVRRTASTPTPDDKLFQKLAKVYSYAHGWMFQGWNCGDYFPDGITNGASWYSLSKGMQDFVYLHTNCFEITLELSCDKFPPEEELQREWLGNREALIQFLEQVHQGIKGMVLDENYNNLANAVISVSGINHDVTSGDHGDYFRLLLPGIYTVSATAPGYDPETVTVTVGPAEPTLVNFHLKRSGSSGGSSGGSSGDAHKSEVAHRFKDLGEENFKALVLIAFAQYLQQCPFEDHVKLVNEVTEFAKTCVADESAENCDKSLHTLFGDKLCTVATLRETYGEMADCCAKQEPERNECFLQHKDDNPNLPRLVRPEVDVMCTAFHDNEETFLKKYLYEIARRHPYFYAPELLFFAKRYKAAFTECCQAADKAACLLPKLDELRDEGKASSAKQRLKCASLQKFGERAFKAWAVARLSQRFPKAEFAEVSKLVTDLTKVHTECCHGDLLECADDRADLAKYICENQDSISSKLKECCEKPLLEKSHCIAEVENDEMPADLPSLAADFVESKDVCKNYAEAKDVFLGMFLYEYARRHPDYSVVLLLRLAKTYETTLEKCCAAADPHECYAKVFDEFKPLVEEPQNLIKQNCELFEQLGEYKFQNALLVRYTKKVPQVSTPTLVEVSRNLGKVGSKCCKHPEAKRMPCAEDYLSVVLNQLCVLHEKTPVSDRVTKCCTESLVNRRPCFSALEVDETYVPKEFNAETFTFHADICTLSEKERQIKKQTALVELVKHKPKATKEQLKAVMDDFAAFVEKCCKADDKETCFAEEGKKLVAASQAALGL

SEQ ID NO: 420 - protein, 995 aa, Artificial Sequence; identical to SEQ ID NO: 418
  hCPN1 variant

SEQ ID NO: 421 - protein, 995 aa, Artificial Sequence; identical to SEQ ID NO: 419
  hCPN1 variant

SEQ ID NO: 422 - protein, 995 aa, Artificial Sequence
  hCPN1 variant
VTFRHHRYDDLVRTLYKVQNECPGITRVYSIGRSVEGRHLYVLEFSDHPGIHEPLEPEVFYVGNMHGDEVLGRELMLQLSEFLCEEFRNRNQRIVQLIQDTRIHILPSMNPDGYEVAAAQGPNKSGYLVGRNNANGVDLNRNFPDLNTYIYYNEKYGGPNHHLPLPDNWKSQVEPETRAFIRWMHSFNFVLAANLHGGAVVANYPYDKSFEHRVRGVRRTASTPTPDDKLFQKLAKVYSYAHGWMFQGWNCGDYFPDGITNGASWYSLSKGMQDFVYLHTNCFEITLELSCDKFPPEEELQREWLGNREALIQFLEQVHQGIKGMVLDENYNNLANAVISVSGINHDVTSGDHGDYFRLLLPGIYTVSATAPGYDPETVTVTVGPAEPTLVNFHLKRSGSSGGSSGGSSGDAHKSEVAHRFKDLGEENFKALVLIAFAQYLQQCPFEDHVKLVNEVTEFAKTCVADESAENCDKSLHTLFGDKLCTVATLRETYGEMADCCAKQEPERNECFLQHKDDNPNLPRLVRPEVDVMCTAFHDNEETFLKKYLYEIARRHPYFYAPELLFFAKRYKAAFTECCQAADKAACLLPKLDELRDEGKASSAKQRLKCASLQKFGERAFKAWAVARLSQRFPKAEFAEVSKLVTDLTKVHTECCHGDLLECADDRADLAKYICENQDSISSKLKECCEKPLLEKSHCIAEVENDEMPADLPSLAADFVESKDVCKNYAEAKDVFLGMFLYEYARRHPDYSVVLLLRLAKTYETTLEKCCAAADPHECYAKVFDEFKPLVEEPQNLIKQNCELFEQLGEYKFQNALLVRYTKKVPQVSTPTLVEVSRNLGKVGSKCCKHPEAKRMPCAEDYLSVVLNQLCVLHEKTPVSDRVTKCCTESLVNRRPCFSALEVDETYVPKEFNAETFTFHADICTLSEKERQIKKQTALVELVKHKPKATKEQLKAVMDDFAAFVEKCCKADDKETCFAEEGKKLVAASQAALGL

SEQ ID NO: 423 - protein, 991 aa, Artificial Sequence; identical to SEQ ID NO: 296
  hCPN1 variant

SEQ ID NO: 424 - protein, 995 aa, Artificial Sequence
  hCPN1 variant
VTFRHHRYDDLVRTLYKVQNECPGITRVYSIGRSVEGRHLYVLEFSDHPGIHEPLEPEVKYVGNMHGNEALGRELMLQLSEFLCEEFRNRNQRIVQLIQDTRIHILPSMNPDGYEVAAAQGPNKPGYLVGRNNANGVDLNRNFPDLNTYIYYNEKYGGPNHHLPLPDNWKSQVEPETRAVIRWMHSFNFVLSANLHGGAVVANYPYDKSFEHRVRGVRRTASTPTPDDKLFQKLAKVYSYAHGYMFSGWNCGDYFPDGITNGASWYSLSKGMQDFNYLHTNCFEITLELSCDKFPPEEELQREWLGNREALIQFLEQVHQGIKGMVLDENYNNLANAVISVSGINHDVTSGDHGDYFRLLLPGIYTVSATAPGYDPETVTVTVGPAEPTLVNFHLKRSGSSGGSSGGSSGDAHKSEVAHRFKDLGEENFKALVLIAFAQYLQQCPFEDHVKLVNEVTEFAKTCVADESAENCDKSLHTLFGDKLCTVATLRETYGEMADCCAKQEPERNECFLQHKDDNPNLPRLVRPEVDVMCTAFHDNEETFLKKYLYEIARRHPYFYAPELLFFAKRYKAAFTECCQAADKAACLLPKLDELRDEGKASSAKQRLKCASLQKFGERAFKAWAVARLSQRFPKAEFAEVSKLVTDLTKVHTECCHGDLLECADDRADLAKYICENQDSISSKLKECCEKPLLEKSHCIAEVENDEMPADLPSLAADFVESKDVCKNYAEAKDVFLGMFLYEYARRHPDYSVVLLLRLAKTYETTLEKCCAAADPHECYAKVFDEFKPLVEEPQNLIKQNCELFEQLGEYKFQNALLVRYTKKVPQVSTPTLVEVSRNLGKVGSKCCKHPEAKRMPCAEDYLSVVLNQLCVLHEKTPVSDRVTKCCTESLVNRRPCFSALEVDETYVPKEFNAETFTFHADICTLSEKERQIKKQTALVELVKHKPKATKEQLKAVMDDFAAFVEKCCKADDKETCFAEEGKKLVAASQAALGL

SEQ ID NO: 425 - protein, 995 aa, Artificial Sequence
  hCPN1 variant
VTFRHHRYDDLVRTLYKVQNECPGITRVYSIGRSVEGRHLYVLEFSDHPGIHEPLEPEVKYVGNMHGNEALGRELMLQLSEFLCEEFRNRNQRIVQLIQDTRIHILPSMNPDGYEVAAAQGPNKPGYLVGRNNANGVDLNRNFPDLNTYIYYNEKYGGPNHHLPLPDNWKSQVEPETRAVIRWMHSFNFVLSANLHGGAVVANYPYDKSFEHRVRGVRRTASTPTPDDKLFQKLAKVYSYAHGYMFLGLNCGDYFPDGITNGASWYSLSKGMQDFNYLHTNCFEITLELSCDKFPPEEELQREWLGNREALIQFLEQVHQGIKGMVLDENYNNLANAVISVSGINHDVTSGDHGDYFRLLLPGIYTVSATAPGYDPETVTVTVGPAEPTLVNFHLKRSGSSGGSSGGSSGDAHKSEVAHRFKDLGEENFKALVLIAFAQYLQQCPFEDHVKLVNEVTEFAKTCVADESAENCDKSLHTLFGDKLCTVATLRETYGEMADCCAKQEPERNECFLQHKDDNPNLPRLVRPEVDVMCTAFHDNEETFLKKYLYEIARRHPYFYAPELLFFAKRYKAAFTECCQAADKAACLLPKLDELRDEGKASSAKQRLKCASLQKFGERAFKAWAVARLSQRFPKAEFAEVSKLVTDLTKVHTECCHGDLLECADDRADLAKYICENQDSISSKLKECCEKPLLEKSHCIAEVENDEMPADLPSLAADFVESKDVCKNYAEAKDVFLGMFLYEYARRHPDYSVVLLLRLAKTYETTLEKCCAAADPHECYAKVFDEFKPLVEEPQNLIKQNCELFEQLGEYKFQNALLVRYTKKVPQVSTPTLVEVSRNLGKVGSKCCKHPEAKRMPCAEDYLSVVLNQLCVLHEKTPVSDRVTKCCTESLVNRRPCFSALEVDETYVPKEFNAETFTFHADICTLSEKERQIKKQTALVELVKHKPKATKEQLKAVMDDFAAFVEKCCKADDKETCFAEEGKKLVAASQAALGL

SEQ ID NO: 426 - protein, 995 aa, Artificial Sequence
  hCPN1 variant
VTFRHHRYDDLVRTLYKVQNECPGITRVYSIGRSVEGRHLYVLEFSDHPGIHEPLEPEVKYVGNMHGNEALGRELMLQLSEFLCEEFRNRNQRIVQLIQDTRIHILPSMNPDGYEVAAAQGPNKPGYLVGRNNANGVDLNRNFPDLNTYIYYNEKYGGPNHHLPLPDNWKSQVEPETRAVIRWMHSFNFVLSANLHGGAVVANYPYDKSFEHRVRGVRRTASTPTPDDKLFQKLAKVYSYAHGYMFLGMNCGDYFPDGITNGASWYSLSKGMQDFNYLHTNCFEITLELSCDKFPPEEELQREWLGNREALIQFLEQVHQGIKGMVLDENYNNLANAVISVSGINHDVTSGDHGDYFRLLLPGIYTVSATAPGYDPETVTVTVGPAEPTLVNFHLKRSGSSGGSSGGSSGDAHKSEVAHRFKDLGEENFKALVLIAFAQYLQQCPFEDHVKLVNEVTEFAKTCVADESAENCDKSLHTLFGDKLCTVATLRETYGEMADCCAKQEPERNECFLQHKDDNPNLPRLVRPEVDVMCTAFHDNEETFLKKYLYEIARRHPYFYAPELLFFAKRYKAAFTECCQAADKAACLLPKLDELRDEGKASSAKQRLKCASLQKFGERAFKAWAVARLSQRFPKAEFAEVSKLVTDLTKVHTECCHGDLLECADDRADLAKYICENQDSISSKLKECCEKPLLEKSHCIAEVENDEMPADLPSLAADFVESKDVCKNYAEAKDVFLGMFLYEYARRHPDYSVVLLLRLAKTYETTLEKCCAAADPHECYAKVFDEFKPLVEEPQNLIKQNCELFEQLGEYKFQNALLVRYTKKVPQVSTPTLVEVSRNLGKVGSKCCKHPEAKRMPCAEDYLSVVLNQLCVLHEKTPVSDRVTKCCTESLVNRRPCFSALEVDETYVPKEFNAETFTFHADICTLSEKERQIKKQTALVELVKHKPKATKEQLKAVMDDFAAFVEKCCKADDKETCFAEEGKKLVAASQAALGL

SEQ ID NO: 427 - protein, 995 aa, Artificial Sequence
  hCPN1 variant
VTFRHHRYDDLVRTLYKVQNECPGITRVYSIGRSVEGRHLYVLEFSDHPGIHEPLEPEVKYVGNMHGNEALGRELMLQLSEFLCEEFRNRNQRIVQLIQDTRIHILPSMNPDGYEVAAAQGPNKPGYLVGRNNANGVDLNRNFPDLNTYIYYNEKYGGPNHHLPLPDNWKSQVEPETRAVIRWMHSFNFVLSANLHGGAVVANYPYDKSFEHRVRGVRRTASTPTPDDKLFQKLAKVYSYAHGWMFYGMNCGDYFPDGITNGASWYSLSKGMQDFNYLHTNCFEITLELSCDKFPPEEELQREWLGNREALIQFLEQVHQGIKGMVLDENYNNLANAVISVSGINHDVTSGDHGDYFRLLLPGIYTVSATAPGYDPETVTVTVGPAEPTLVNFHLKRSGSSGGSSGGSSGDAHKSEVAHRFKDLGEENFKALVLIAFAQYLQQCPFEDHVKLVNEVTEFAKTCVADESAENCDKSLHTLFGDKLCTVATLRETYGEMADCCAKQEPERNECFLQHKDDNPNLPRLVRPEVDVMCTAFHDNEETFLKKYLYEIARRHPYFYAPELLFFAKRYKAAFTECCQAADKAACLLPKLDELRDEGKASSAKQRLKCASLQKFGERAFKAWAVARLSQRFPKAEFAEVSKLVTDLTKVHTECCHGDLLECADDRADLAKYICENQDSISSKLKECCEKPLLEKSHCIAEVENDEMPADLPSLAADFVESKDVCKNYAEAKDVFLGMFLYEYARRHPDYSVVLLLRLAKTYETTLEKCCAAADPHECYAKVFDEFKPLVEEPQNLIKQNCELFEQLGEYKFQNALLVRYTKKVPQVSTPTLVEVSRNLGKVGSKCCKHPEAKRMPCAEDYLSVVLNQLCVLHEKTPVSDRVTKCCTESLVNRRPCFSALEVDETYVPKEFNAETFTFHADICTLSEKERQIKKQTALVELVKHKPKATKEQLKAVMDDFAAFVEKCCKADDKETCFAEEGKKLVAASQAALGL

SEQ ID NO: 428 - protein, 995 aa, Artificial Sequence
  hCPN1 variant
VTFRHHRYDDLVRTLYKVQNECPGITRVYSIGRSVEGRHLYVLEFSDHPGIHEPLEPEVKYVGNMHGNEALGRELMLQLSEFLCEEFRNRNQRIVQLIQDTRIHILPSMNPDGYEVAAAQGPNKPGYLVGRNNANGVDLNRNFPDLNTYIYYNEKYGGPNHHLPLPDNWKSQVEPETRAVIRWMHSFNFVLSANLHGGAVVANYPYDKSFEHRVRGVRRTASTPTPDDKLFQKLAKVYSYAHGWMFYGWNCGDYFPDGITNGASWYSLSKGMQDFNYLHTNCFEITLELSCDKFPPEEELQREWLGNREALIQFLEQVHQGIKGMVLDENYNNLANAVISVSGINHDVTSGDHGDYFRLLLPGIYTVSATAPGYDPETVTVTVGPAEPTLVNFHLKRSGSSGGSSGGSSGDAHKSEVAHRFKDLGEENFKALVLIAFAQYLQQCPFEDHVKLVNEVTEFAKTCVADESAENCDKSLHTLFGDKLCTVATLRETYGEMADCCAKQEPERNECFLQHKDDNPNLPRLVRPEVDVMCTAFHDNEETFLKKYLYEIARRHPYFYAPELLFFAKRYKAAFTECCQAADKAACLLPKLDELRDEGKASSAKQRLKCASLQKFGERAFKAWAVARLSQRFPKAEFAEVSKLVTDLTKVHTECCHGDLLECADDRADLAKYICENQDSISSKLKECCEKPLLEKSHCIAEVENDEMPADLPSLAADFVESKDVCKNYAEAKDVFLGMFLYEYARRHPDYSVVLLLRLAKTYETTLEKCCAAADPHECYAKVFDEFKPLVEEPQNLIKQNCELFEQLGEYKFQNALLVRYTKKVPQVSTPTLVEVSRNLGKVGSKCCKHPEAKRMPCAEDYLSVVLNQLCVLHEKTPVSDRVTKCCTESLVNRRPCFSALEVDETYVPKEFNAETFTFHADICTLSEKERQIKKQTALVELVKHKPKATKEQLKAVMDDFAAFVEKCCKADDKETCFAEEGKKLVAASQAALGL

SEQ ID NO: 429 - protein, 995 aa, Artificial Sequence
  hCPN1 variant
VTFRHHRYDDLVRTLYKVQNECPGITRVYSIGRSVEGRHLYVLEFSDHPGIHEPLEPEVKYVGNMHGNEALGRELMLQLSEFLCEEFRNRNQRIVQLIQDTRIHILPSMNPDGYEVAAAQGPNKPGYLVGRNNANGVDLNRNFPDLNTYIYYNEKYGGPNHHLPLPDNWKSQVEPETRAVIRWMHSFNFVLSANLHGGAVVANYPYDKSFEHRVRGVRRTASTPTPDDKLFQKLAKVYSYAHGYMFLGFNCGDYFPDGITNGASWYSLSKGMQDFNYLHTNCFEITLELSCDKFPPEEELQREWLGNREALIQFLEQVHQGIKGMVLDENYNNLANAVISVSGINHDVTSGDHGDYFRLLLPGIYTVSATAPGYDPETVTVTVGPAEPTLVNFHLKRSGSSGGSSGGSSGDAHKSEVAHRFKDLGEENFKALVLIAFAQYLQQCPFEDHVKLVNEVTEFAKTCVADESAENCDKSLHTLFGDKLCTVATLRETYGEMADCCAKQEPERNECFLQHKDDNPNLPRLVRPEVDVMCTAFHDNEETFLKKYLYEIARRHPYFYAPELLFFAKRYKAAFTECCQAADKAACLLPKLDELRDEGKASSAKQRLKCASLQKFGERAFKAWAVARLSQRFPKAEFAEVSKLVTDLTKVHTECCHGDLLECADDRADLAKYICENQDSISSKLKECCEKPLLEKSHCIAEVENDEMPADLPSLAADFVESKDVCKNYAEAKDVFLGMFLYEYARRHPDYSVVLLLRLAKTYETTLEKCCAAADPHECYAKVFDEFKPLVEEPQNLIKQNCELFEQLGEYKFQNALLVRYTKKVPQVSTPTLVEVSRNLGKVGSKCCKHPEAKRMPCAEDYLSVVLNQLCVLHEKTPVSDRVTKCCTESLVNRRPCFSALEVDETYVPKEFNAETFTFHADICTLSEKERQIKKQTALVELVKHKPKATKEQLKAVMDDFAAFVEKCCKADDKETCFAEEGKKLVAASQAALGL

SEQ ID NO: 430 - protein, 995 aa, Artificial Sequence
  hCPN1 variant
VTFRHHRYDDLVRTLYKVQNECPGITRVYSIGRSVEGRHLYVLEFSDHPGIHEPLEPEVKYVGNMHGNEALGRELMLQLSEFLCEEFRNRNQRIVQLIQDTRIHILPSMNPDGYEVAAAQGPNKPGYLVGRNNANGVDLNRNFPDLNTYIYYNEKYGGPNHHLPLPDNWKSQVEPETRAVIRWMHSFNFVLSANLHGGAVVANYPYDKSFEHRVRGVRRTASTPTPDDKLFQKLAKVYSYAHGYMFLGYNCGDYFPDGITNGASWYSLSKGMQDFNYLHTNCFEITLELSCDKFPPEEELQREWLGNREALIQFLEQVHQGIKGMVLDENYNNLANAVISVSGINHDVTSGDHGDYFRLLLPGIYTVSATAPGYDPETVTVTVGPAEPTLVNFHLKRSGSSGGSSGGSSGDAHKSEVAHRFKDLGEENFKALVLIAFAQYLQQCPFEDHVKLVNEVTEFAKTCVADESAENCDKSLHTLFGDKLCTVATLRETYGEMADCCAKQEPERNECFLQHKDDNPNLPRLVRPEVDVMCTAFHDNEETFLKKYLYEIARRHPYFYAPELLFFAKRYKAAFTECCQAADKAACLLPKLDELRDEGKASSAKQRLKCASLQKFGERAFKAWAVARLSQRFPKAEFAEVSKLVTDLTKVHTECCHGDLLECADDRADLAKYICENQDSISSKLKECCEKPLLEKSHCIAEVENDEMPADLPSLAADFVESKDVCKNYAEAKDVFLGMFLYEYARRHPDYSVVLLLRLAKTYETTLEKCCAAADPHECYAKVFDEFKPLVEEPQNLIKQNCELFEQLGEYKFQNALLVRYTKKVPQVSTPTLVEVSRNLGKVGSKCCKHPEAKRMPCAEDYLSVVLNQLCVLHEKTPVSDRVTKCCTESLVNRRPCFSALEVDETYVPKEFNAETFTFHADICTLSEKERQIKKQTALVELVKHKPKATKEQLKAVMDDFAAFVEKCCKADDKETCFAEEGKKLVAASQAALGL

SEQ ID NO: 431 - protein, 995 aa, Artificial Sequence
  hCPN1 variant
VTFRHHRYDDLVRTLYKVQNECPGITRVYSIGRSVEGRHLYVLEFSDHPGIHEPLEPEVKYVGNMHGNEALGRELMLQLSEFLCEEFRNRNQRIVQLIQDTRIHILPSMNPDGYEVAAAQGPNKPGYLVGRNNANGVDLNRNFPDLNTYIYYNEKYGGPNHHLPLPDNWKSQVEPETRAVIRWMHSFNFVLSANLHGGAVVANYPYDKSFEHRVRGVRRTASTPTPDDKLFQKLAKVYSYAHGWMFYGLNCGDYFPDGITNGASWYSLSKGMQDFNYLHTNCFEITLELSCDKFPPEEELQREWLGNREALIQFLEQVHQGIKGMVLDENYNNLANAVISVSGINHDVTSGDHGDYFRLLLPGIYTVSATAPGYDPETVTVTVGPAEPTLVNFHLKRSGSSGGSSGGSSGDAHKSEVAHRFKDLGEENFKALVLIAFAQYLQQCPFEDHVKLVNEVTEFAKTCVADESAENCDKSLHTLFGDKLCTVATLRETYGEMADCCAKQEPERNECFLQHKDDNPNLPRLVRPEVDVMCTAFHDNEETFLKKYLYEIARRHPYFYAPELLFFAKRYKAAFTECCQAADKAACLLPKLDELRDEGKASSAKQRLKCASLQKFGERAFKAWAVARLSQRFPKAEFAEVSKLVTDLTKVHTECCHGDLLECADDRADLAKYICENQDSISSKLKECCEKPLLEKSHCIAEVENDEMPADLPSLAADFVESKDVCKNYAEAKDVFLGMFLYEYARRHPDYSVVLLLRLAKTYETTLEKCCAAADPHECYAKVFDEFKPLVEEPQNLIKQNCELFEQLGEYKFQNALLVRYTKKVPQVSTPTLVEVSRNLGKVGSKCCKHPEAKRMPCAEDYLSVVLNQLCVLHEKTPVSDRVTKCCTESLVNRRPCFSALEVDETYVPKEFNAETFTFHADICTLSEKERQIKKQTALVELVKHKPKATKEQLKAVMDDFAAFVEKCCKADDKETCFAEEGKKLVAASQAALGL

SEQ ID NO: 432 - protein, 995 aa, Artificial Sequence
  hCPN1 variant
VTFRHHRYDDLVRTLYKVQNECPGITRVYSIGRSVEGRHLYVLEFSDHPGIHEPLEPEVKYVGNMHGNEALGRELMLQLSEFLCEEFRNRNQRIVQLIQDTRIHILPSMNPDGYEVAAAQGPNKPGYLVGRNNANGVDLNRNFPDLNTYIYYNEKYGGPNHHLPLPDNWKSQVEPETRAVIRWMHSFNFVLSANLHGGAVVANYPYDKSFEHRVRGVRRTASTPTPDDKLFQKLAKVYSYAHGYMFMGLNCGDYFPDGITNGASWYSLSKGMQDFNYLHTNCFEITLELSCDKFPPEEELQREWLGNREALIQFLEQVHQGIKGMVLDENYNNLANAVISVSGINHDVTSGDHGDYFRLLLPGIYTVSATAPGYDPETVTVTVGPAEPTLVNFHLKRSGSSGGSSGGSSGDAHKSEVAHRFKDLGEENFKALVLIAFAQYLQQCPFEDHVKLVNEVTEFAKTCVADESAENCDKSLHTLFGDKLCTVATLRETYGEMADCCAKQEPERNECFLQHKDDNPNLPRLVRPEVDVMCTAFHDNEETFLKKYLYEIARRHPYFYAPELLFFAKRYKAAFTECCQAADKAACLLPKLDELRDEGKASSAKQRLKCASLQKFGERAFKAWAVARLSQRFPKAEFAEVSKLVTDLTKVHTECCHGDLLECADDRADLAKYICENQDSISSKLKECCEKPLLEKSHCIAEVENDEMPADLPSLAADFVESKDVCKNYAEAKDVFLGMFLYEYARRHPDYSVVLLLRLAKTYETTLEKCCAAADPHECYAKVFDEFKPLVEEPQNLIKQNCELFEQLGEYKFQNALLVRYTKKVPQVSTPTLVEVSRNLGKVGSKCCKHPEAKRMPCAEDYLSVVLNQLCVLHEKTPVSDRVTKCCTESLVNRRPCFSALEVDETYVPKEFNAETFTFHADICTLSEKERQIKKQTALVELVKHKPKATKEQLKAVMDDFAAFVEKCCKADDKETCFAEEGKKLVAASQAALGL

SEQ ID NO: 433 - protein, 995 aa, Artificial Sequence
  hCPN1 variant
VTFRHHRYDDLVRTLYKVQNECPGITRVYSIGRSVEGRHLYVLEFSDHPGIHEPLEPEVKYVGNMHGNEALGRELMLQLSEFLCEEFRNRNQRIVQLIQDTRIHILPSMNPDGYEVAAAQGPNKPGYLVGRNNANGVDLNRNFPDLNTYIYYNEKYGGPNHHLPLPDNWKSQVEPETRAVIRWMHSFNFVLSANLHGGAVVANYPYDKSFEHRVRGVRRTASTPTPDDKLFQKLAKVYSYAHGDMFFGHNCGDYFPDGITNGASWYSLSKGMQDFNYLHTNCFEITLELSCDKFPPEEELQREWLGNREALIQFLEQVHQGIKGMVLDENYNNLANAVISVSGINHDVTSGDHGDYFRLLLPGIYTVSATAPGYDPETVTVTVGPAEPTLVNFHLKRSGSSGGSSGGSSGDAHKSEVAHRFKDLGEENFKALVLIAFAQYLQQCPFEDHVKLVNEVTEFAKTCVADESAENCDKSLHTLFGDKLCTVATLRETYGEMADCCAKQEPERNECFLQHKDDNPNLPRLVRPEVDVMCTAFHDNEETFLKKYLYEIARRHPYFYAPELLFFAKRYKAAFTECCQAADKAACLLPKLDELRDEGKASSAKQRLKCASLQKFGERAFKAWAVARLSQRFPKAEFAEVSKLVTDLTKVHTECCHGDLLECADDRADLAKYICENQDSISSKLKECCEKPLLEKSHCIAEVENDEMPADLPSLAADFVESKDVCKNYAEAKDVFLGMFLYEYARRHPDYSVVLLLRLAKTYETTLEKCCAAADPHECYAKVFDEFKPLVEEPQNLIKQNCELFEQLGEYKFQNALLVRYTKKVPQVSTPTLVEVSRNLGKVGSKCCKHPEAKRMPCAEDYLSVVLNQLCVLHEKTPVSDRVTKCCTESLVNRRPCFSALEVDETYVPKEFNAETFTFHADICTLSEKERQIKKQTALVELVKHKPKATKEQLKAVMDDFAAFVEKCCKADDKETCFAEEGKKLVAASQAALGL

SEQ ID NO: 434 - protein, 995 aa, Artificial Sequence
  hCPN1 variant
VTFRHHRYDDLVRTLYKVQNECPGITRVYSIGRSVEGRHLYVLEFSDHPGIHEPLEPEVKYVGNMHGNEALGRELMLQLSEFLCEEFRNRNQRIVQLIQDTRIHILPSMNPDGYEVAAAQGPNKPGYLVGRNNANGVDLNRNFPDLNTYIYYNEKYGGPNHHLPLPDNWKSQVEPETRAVIRWMHSFNFVLSANLHGGAVVANYPYDKSFEHRVRGVRRTASTPTPDDKLFQKLAKVYSYAHGYMFNGFNCGDYFPDGITNGASWYSLSKGMQDFNYLHTNCFEITLELSCDKFPPEEELQREWLGNREALIQFLEQVHQGIKGMVLDENYNNLANAVISVSGINHDVTSGDHGDYFRLLLPGIYTVSATAPGYDPETVTVTVGPAEPTLVNFHLKRSGSSGGSSGGSSGDAHKSEVAHRFKDLGEENFKALVLIAFAQYLQQCPFEDHVKLVNEVTEFAKTCVADESAENCDKSLHTLFGDKLCTVATLRETYGEMADCCAKQEPERNECFLQHKDDNPNLPRLVRPEVDVMCTAFHDNEETFLKKYLYEIARRHPYFYAPELLFFAKRYKAAFTECCQAADKAACLLPKLDELRDEGKASSAKQRLKCASLQKFGERAFKAWAVARLSQRFPKAEFAEVSKLVTDLTKVHTECCHGDLLECADDRADLAKYICENQDSISSKLKECCEKPLLEKSHCIAEVENDEMPADLPSLAADFVESKDVCKNYAEAKDVFLGMFLYEYARRHPDYSVVLLLRLAKTYETTLEKCCAAADPHECYAKVFDEFKPLVEEPQNLIKQNCELFEQLGEYKFQNALLVRYTKKVPQVSTPTLVEVSRNLGKVGSKCCKHPEAKRMPCAEDYLSVVLNQLCVLHEKTPVSDRVTKCCTESLVNRRPCFSALEVDETYVPKEFNAETFTFHADICTLSEKERQIKKQTALVELVKHKPKATKEQLKAVMDDFAAFVEKCCKADDKETCFAEEGKKLVAASQAALGL

SEQ ID NO: 435 - protein, 995 aa, Artificial Sequence
  hCPN1 variant
VTFRHHRYDDLVRTLYKVQNECPGITRVYSIGRSVEGRHLYVLEFSDHPGIHEPLEPEVKYVGNMHGNEALGRELMLQLSEFLCEEFRNRNQRIVQLIQDTRIHILPSMNPDGYEVAAAQGPNKPGYLVGRNNANGVDLNRNFPDLNTYIYYNEKYGGPNHHLPLPDNWKSQVEPETRAVIRWMHSFNFVLSANLHGGAVVANYPYDKSFEHRVRGVRRTASTPTPDDKLFQKLAKVYSYAHEYMYLGYSCGDYFPDGITNGASWYSLSKGMQDFNYLHTNCFEITLELSCDKFPPEEELQREWLGNREALIQFLEQVHQGIKGMVLDENYNNLANAVISVSGINHDVTSGDHGDYFRLLLPGIYTVSATAPGYDPETVTVTVGPAEPTLVNFHLKRSGSSGGSSGGSSGDAHKSEVAHRFKDLGEENFKALVLIAFAQYLQQCPFEDHVKLVNEVTEFAKTCVADESAENCDKSLHTLFGDKLCTVATLRETYGEMADCCAKQEPERNECFLQHKDDNPNLPRLVRPEVDVMCTAFHDNEETFLKKYLYEIARRHPYFYAPELLFFAKRYKAAFTECCQAADKAACLLPKLDELRDEGKASSAKQRLKCASLQKFGERAFKAWAVARLSQRFPKAEFAEVSKLVTDLTKVHTECCHGDLLECADDRADLAKYICENQDSISSKLKECCEKPLLEKSHCIAEVENDEMPADLPSLAADFVESKDVCKNYAEAKDVFLGMFLYEYARRHPDYSVVLLLRLAKTYETTLEKCCAAADPHECYAKVFDEFKPLVEEPQNLIKQNCELFEQLGEYKFQNALLVRYTKKVPQVSTPTLVEVSRNLGKVGSKCCKHPEAKRMPCAEDYLSVVLNQLCVLHEKTPVSDRVTKCCTESLVNRRPCFSALEVDETYVPKEFNAETFTFHADICTLSEKERQIKKQTALVELVKHKPKATKEQLKAVMDDFAAFVEKCCKADDKETCFAEEGKKLVAASQAALGL

SEQ ID NO: 436 - protein, 995 aa, Artificial Sequence
  hCPN1 variant
VTFRHHRYDDLVRTLYKVQNECPGITRVYSIGRSVEGRHLYVLEFSDHPGIHEPLEPEVKYVGNMHGNEALGRELMLQLSEFLCEEFRNRNQRIVQLIQDTRIHILPSMNPDGYEVAAAQGPNKPGYLVGRNNANGVDLNRNFPDLNTYIYYNEKYGGPNHHLPLPDNWKSQVEPETRAVIRWMHSFNFVLSANLHGGAVVANYPYDKSFEHRVRGVRRTASTPTPDDKLFQKLAKVYSYAHAYMWSGWNCGLYFPDGITNGASWYSLSKGMQDFNYLHTNCFEITLELSCDKFPPEEELQREWLGNREALIQFLEQVHQGIKGMVLDENYNNLANAVISVSGINHDVTSGDHGDYFRLLLPGIYTVSATAPGYDPETVTVTVGPAEPTLVNFHLKRSGSSGGSSGGSSGDAHKSEVAHRFKDLGEENFKALVLIAFAQYLQQCPFEDHVKLVNEVTEFAKTCVADESAENCDKSLHTLFGDKLCTVATLRETYGEMADCCAKQEPERNECFLQHKDDNPNLPRLVRPEVDVMCTAFHDNEETFLKKYLYEIARRHPYFYAPELLFFAKRYKAAFTECCQAADKAACLLPKLDELRDEGKASSAKQRLKCASLQKFGERAFKAWAVARLSQRFPKAEFAEVSKLVTDLTKVHTECCHGDLLECADDRADLAKYICENQDSISSKLKECCEKPLLEKSHCIAEVENDEMPADLPSLAADFVESKDVCKNYAEAKDVFLGMFLYEYARRHPDYSVVLLLRLAKTYETTLEKCCAAADPHECYAKVFDEFKPLVEEPQNLIKQNCELFEQLGEYKFQNALLVRYTKKVPQVSTPTLVEVSRNLGKVGSKCCKHPEAKRMPCAEDYLSVVLNQLCVLHEKTPVSDRVTKCCTESLVNRRPCFSALEVDETYVPKEFNAETFTFHADICTLSEKERQIKKQTALVELVKHKPKATKEQLKAVMDDFAAFVEKCCKADDKETCFAEEGKKLVAASQAALGL

SEQ ID NO: 437 - protein, 995 aa, Artificial Sequence
  hCPN1 variant
VTFRHHRYDDLVRTLYKVQNECPGITRVYSIGRSVEGRHLYVLEFSDHPGIHEPLEPEVKYVGNMHGNEALGRELMLQLSEFLCEEFRNRNQRIVQLIQDTRIHILPSMNPDGYEVAAAQGPNKPGYLVGRNNANGVDLNRNFPDLNTYIYYNEKYGGPNHHLPLPDNWKSQVEPETRAVIRWMHSFNFVLSANLHGGAVVANYPYDKSFEHRVRGVRRTASTPTPDDKLFQKLAKVYSYAHYMMWSGWNCGLYFPDGITNGASWYSLSKGMQDFNYLHTNCFEITLELSCDKFPPEEELQREWLGNREALIQFLEQVHQGIKGMVLDENYNNLANAVISVSGINHDVTSGDHGDYFRLLLPGIYTVSATAPGYDPETVTVTVGPAEPTLVNFHLKRSGSSGGSSGGSSGDAHKSEVAHRFKDLGEENFKALVLIAFAQYLQQCPFEDHVKLVNEVTEFAKTCVADESAENCDKSLHTLFGDKLCTVATLRETYGEMADCCAKQEPERNECFLQHKDDNPNLPRLVRPEVDVMCTAFHDNEETFLKKYLYEIARRHPYFYAPELLFFAKRYKAAFTECCQAADKAACLLPKLDELRDEGKASSAKQRLKCASLQKFGERAFKAWAVARLSQRFPKAEFAEVSKLVTDLTKVHTECCHGDLLECADDRADLAKYICENQDSISSKLKECCEKPLLEKSHCIAEVENDEMPADLPSLAADFVESKDVCKNYAEAKDVFLGMFLYEYARRHPDYSVVLLLRLAKTYETTLEKCCAAADPHECYAKVFDEFKPLVEEPQNLIKQNCELFEQLGEYKFQNALLVRYTKKVPQVSTPTLVEVSRNLGKVGSKCCKHPEAKRMPCAEDYLSVVLNQLCVLHEKTPVSDRVTKCCTESLVNRRPCFSALEVDETYVPKEFNAETFTFHADICTLSEKERQIKKQTALVELVKHKPKATKEQLKAVMDDFAAFVEKCCKADDKETCFAEEGKKLVAASQAALGL

SEQ ID NO: 438 - protein, 995 aa, Artificial Sequence
  hCPN1 variant
VTFRHHRYDDLVRTLYKVQNECPGITRVYSIGRSVEGRHLYVLEFSDHPGIHEPLEPEVKYVGNMHGNEALGRELMLQLSEFLCEEFRNRNQRIVQLIQDTRIHILPSMNPDGYEVAAAQGPNKPGYLVGRNNANGVDLNRNFPDLNTYIYYNEKYGGPNHHLPLPDNWKSQVEPETRAVIRWMHSFNFVLSANLHGGAVVANYPYDKSFEHRVRGVRRTASTPTPDDKLFQKLAKVYSYAHAYMWAGWNCGLYFPDGITNGASWYSLSKGMQDFNYLHTNCFEITLELSCDKFPPEEELQREWLGNREALIQFLEQVHQGIKGMVLDENYNNLANAVISVSGINHDVTSGDHGDYFRLLLPGIYTVSATAPGYDPETVTVTVGPAEPTLVNFHLKRSGSSGGSSGGSSGDAHKSEVAHRFKDLGEENFKALVLIAFAQYLQQCPFEDHVKLVNEVTEFAKTCVADESAENCDKSLHTLFGDKLCTVATLRETYGEMADCCAKQEPERNECFLQHKDDNPNLPRLVRPEVDVMCTAFHDNEETFLKKYLYEIARRHPYFYAPELLFFAKRYKAAFTECCQAADKAACLLPKLDELRDEGKASSAKQRLKCASLQKFGERAFKAWAVARLSQRFPKAEFAEVSKLVTDLTKVHTECCHGDLLECADDRADLAKYICENQDSISSKLKECCEKPLLEKSHCIAEVENDEMPADLPSLAADFVESKDVCKNYAEAKDVFLGMFLYEYARRHPDYSVVLLLRLAKTYETTLEKCCAAADPHECYAKVFDEFKPLVEEPQNLIKQNCELFEQLGEYKFQNALLVRYTKKVPQVSTPTLVEVSRNLGKVGSKCCKHPEAKRMPCAEDYLSVVLNQLCVLHEKTPVSDRVTKCCTESLVNRRPCFSALEVDETYVPKEFNAETFTFHADICTLSEKERQIKKQTALVELVKHKPKATKEQLKAVMDDFAAFVEKCCKADDKETCFAEEGKKLVAASQAALGL

SEQ ID NO: 439 - protein, 995 aa, Artificial Sequence
  hCPN1 variant
VTFRHHRYDDLVRTLYKVQNECPGITRVYSIGRSVEGRHLYVLEFSDHPGIHEPLEPEVKYVGNMHGNEALGRELMLQLSEFLCEEFRNRNQRIVQLIQDTRIHILPSMNPDGYEVAAAQGPNKPGYLVGRNNANGVDLNRNFPDLNTYIYYNEKYGGPNHHLPLPDNWKSQVEPETRAVIRWMHSFNFVLSANLHGGAVVANYPYDKSFEHRVRGVRRTASTPTPDDKLFQKLAKVYSYAHWWMYLGWSCGNYFPDGITNGASWYSLSKGMQDFNYLHTNCFEITLELSCDKFPPEEELQREWLGNREALIQFLEQVHQGIKGMVLDENYNNLANAVISVSGINHDVTSGDHGDYFRLLLPGIYTVSATAPGYDPETVTVTVGPAEPTLVNFHLKRSGSSGGSSGGSSGDAHKSEVAHRFKDLGEENFKALVLIAFAQYLQQCPFEDHVKLVNEVTEFAKTCVADESAENCDKSLHTLFGDKLCTVATLRETYGEMADCCAKQEPERNECFLQHKDDNPNLPRLVRPEVDVMCTAFHDNEETFLKKYLYEIARRHPYFYAPELLFFAKRYKAAFTECCQAADKAACLLPKLDELRDEGKASSAKQRLKCASLQKFGERAFKAWAVARLSQRFPKAEFAEVSKLVTDLTKVHTECCHGDLLECADDRADLAKYICENQDSISSKLKECCEKPLLEKSHCIAEVENDEMPADLPSLAADFVESKDVCKNYAEAKDVFLGMFLYEYARRHPDYSVVLLLRLAKTYETTLEKCCAAADPHECYAKVFDEFKPLVEEPQNLIKQNCELFEQLGEYKFQNALLVRYTKKVPQVSTPTLVEVSRNLGKVGSKCCKHPEAKRMPCAEDYLSVVLNQLCVLHEKTPVSDRVTKCCTESLVNRRPCFSALEVDETYVPKEFNAETFTFHADICTLSEKERQIKKQTALVELVKHKPKATKEQLKAVMDDFAAFVEKCCKADDKETCFAEEGKKLVAASQAALGL

SEQ ID NO: 440 - protein, 995 aa, Artificial Sequence
  hCPN1 variant
VTFRHHRYDDLVRTLYKVQNECPGITRVYSIGRSVEGRHLYVLEFSDHPGIHEPLEPEVKYVGNMHGNEALGRELMLQLSEFLCEEFRNRNQRIVQLIQDTRIHILPSMNPDGYEVAAAQGPNKPGYLVGRNNANGVDLNRNFPDLNTYIYYNEKYGGPNHHLPLPDNWKSQVEPETRAVIRWMHSFNFVLSANLHGGAVVANYPYDKSFEHRVRGVRRTASTPTPDDKLFQKLAKVYSYAHEYMAQGYSCGDYFPDGITNGASWYSLSKGMQDFNYLHTNCFEITLELSCDKFPPEEELQREWLGNREALIQFLEQVHQGIKGMVLDENYNNLANAVISVSGINHDVTSGDHGDYFRLLLPGIYTVSATAPGYDPETVTVTVGPAEPTLVNFHLKRSGSSGGSSGGSSGDAHKSEVAHRFKDLGEENFKALVLIAFAQYLQQCPFEDHVKLVNEVTEFAKTCVADESAENCDKSLHTLFGDKLCTVATLRETYGEMADCCAKQEPERNECFLQHKDDNPNLPRLVRPEVDVMCTAFHDNEETFLKKYLYEIARRHPYFYAPELLFFAKRYKAAFTECCQAADKAACLLPKLDELRDEGKASSAKQRLKCASLQKFGERAFKAWAVARLSQRFPKAEFAEVSKLVTDLTKVHTECCHGDLLECADDRADLAKYICENQDSISSKLKECCEKPLLEKSHCIAEVENDEMPADLPSLAADFVESKDVCKNYAEAKDVFLGMFLYEYARRHPDYSVVLLLRLAKTYETTLEKCCAAADPHECYAKVFDEFKPLVEEPQNLIKQNCELFEQLGEYKFQNALLVRYTKKVPQVSTPTLVEVSRNLGKVGSKCCKHPEAKRMPCAEDYLSVVLNQLCVLHEKTPVSDRVTKCCTESLVNRRPCFSALEVDETYVPKEFNAETFTFHADICTLSEKERQIKKQTALVELVKHKPKATKEQLKAVMDDFAAFVEKCCKADDKETCFAEEGKKLVAASQAALGL

SEQ ID NO: 441 - protein, 995 aa, Artificial Sequence
  hCPN1 variant
VTFRHHRYDDLVRTLYKVQNECPGITRVYSIGRSVEGRHLYVLEFSDHPGIHEPLEPEVKYVGNMHGNEALGRELMLQLSEFLCEEFRNRNQRIVQLIQDTRIHILPSMNPDGYEVAAAQGPNKPGYLVGRNNANGVDLNRNFPDLNTYIYYNEKYGGPNHHLPLPDNWKSQVEPETRAVIRWMHSFNFVLSANLHGGAVVANYPYDKSFEHRVRGVRRTASTPTPDDKLFQKLAKVYSYAHYIMWSGWNCGLYFPDGITNGASWYSLSKGMQDFNYLHTNCFEITLELSCDKFPPEEELQREWLGNREALIQFLEQVHQGIKGMVLDENYNNLANAVISVSGINHDVTSGDHGDYFRLLLPGIYTVSATAPGYDPETVTVTVGPAEPTLVNFHLKRSGSSGGSSGGSSGDAHKSEVAHRFKDLGEENFKALVLIAFAQYLQQCPFEDHVKLVNEVTEFAKTCVADESAENCDKSLHTLFGDKLCTVATLRETYGEMADCCAKQEPERNECFLQHKDDNPNLPRLVRPEVDVMCTAFHDNEETFLKKYLYEIARRHPYFYAPELLFFAKRYKAAFTECCQAADKAACLLPKLDELRDEGKASSAKQRLKCASLQKFGERAFKAWAVARLSQRFPKAEFAEVSKLVTDLTKVHTECCHGDLLECADDRADLAKYICENQDSISSKLKECCEKPLLEKSHCIAEVENDEMPADLPSLAADFVESKDVCKNYAEAKDVFLGMFLYEYARRHPDYSVVLLLRLAKTYETTLEKCCAAADPHECYAKVFDEFKPLVEEPQNLIKQNCELFEQLGEYKFQNALLVRYTKKVPQVSTPTLVEVSRNLGKVGSKCCKHPEAKRMPCAEDYLSVVLNQLCVLHEKTPVSDRVTKCCTESLVNRRPCFSALEVDETYVPKEFNAETFTFHADICTLSEKERQIKKQTALVELVKHKPKATKEQLKAVMDDFAAFVEKCCKADDKETCFAEEGKKLVAASQAALGL

SEQ ID NO: 442 - protein, 995 aa, Artificial Sequence
  hCPN1 variant
VTFRHHRYDDLVRTLYKVQNECPGITRVYSIGRSVEGRHLYVLEFSDHPGIHEPLEPEVKYVGNMHGNEALGRELMLQLSEFLCEEFRNRNQRIVQLIQDTRIHILPSMNPDGYEVAAAQGPNKPGYLVGRNNANGVDLNRNFPDLNTYIYYNEKYGGPNHHLPLPDNWKSQVEPETRAVIRWMHSFNFVLSANLHGGAVVANYPYDKSFEHRVRGVRRTASTPTPDDKLFQKLAKVYSYAHWWMFYGWSCGNYFPDGITNGASWYSLSKGMQDFNYLHTNCFEITLELSCDKFPPEEELQREWLGNREALIQFLEQVHQGIKGMVLDENYNNLANAVISVSGINHDVTSGDHGDYFRLLLPGIYTVSATAPGYDPETVTVTVGPAEPTLVNFHLKRSGSSGGSSGGSSGDAHKSEVAHRFKDLGEENFKALVLIAFAQYLQQCPFEDHVKLVNEVTEFAKTCVADESAENCDKSLHTLFGDKLCTVATLRETYGEMADCCAKQEPERNECFLQHKDDNPNLPRLVRPEVDVMCTAFHDNEETFLKKYLYEIARRHPYFYAPELLFFAKRYKAAFTECCQAADKAACLLPKLDELRDEGKASSAKQRLKCASLQKFGERAFKAWAVARLSQRFPKAEFAEVSKLVTDLTKVHTECCHGDLLECADDRADLAKYICENQDSISSKLKECCEKPLLEKSHCIAEVENDEMPADLPSLAADFVESKDVCKNYAEAKDVFLGMFLYEYARRHPDYSVVLLLRLAKTYETTLEKCCAAADPHECYAKVFDEFKPLVEEPQNLIKQNCELFEQLGEYKFQNALLVRYTKKVPQVSTPTLVEVSRNLGKVGSKCCKHPEAKRMPCAEDYLSVVLNQLCVLHEKTPVSDRVTKCCTESLVNRRPCFSALEVDETYVPKEFNAETFTFHADICTLSEKERQIKKQTALVELVKHKPKATKEQLKAVMDDFAAFVEKCCKADDKETCFAEEGKKLVAASQAALGL

SEQ ID NO: 443 - protein, 995 aa, Artificial Sequence
  hCPN1 variant
VTFRHHRYDDLVRTLYKVQNECPGITRVYSIGRSVEGRHLYVLEFSDHPGIHEPLEPEVKYVGNMHGNEALGRELMLQLSEFLCEEFRNRNQRIVQLIQDTRIHILPSMNPDGYEVAAAQGPNKPGYLVGRNNANGVDLNRNFPDLNTYIYYNEKYGGPNHHLPLPDNWKSQVEPETRAVIRWMHSFNFVLSANLHGGAVVANYPYDKSFEHRVRGVRRTASTPTPDDKLFQKLAKVYSYAHWWMWLGWSCGNYFPDGITNGASWYSLSKGMQDFNYLHTNCFEITLELSCDKFPPEEELQREWLGNREALIQFLEQVHQGIKGMVLDENYNNLANAVISVSGINHDVTSGDHGDYFRLLLPGIYTVSATAPGYDPETVTVTVGPAEPTLVNFHLKRSGSSGGSSGGSSGDAHKSEVAHRFKDLGEENFKALVLIAFAQYLQQCPFEDHVKLVNEVTEFAKTCVADESAENCDKSLHTLFGDKLCTVATLRETYGEMADCCAKQEPERNECFLQHKDDNPNLPRLVRPEVDVMCTAFHDNEETFLKKYLYEIARRHPYFYAPELLFFAKRYKAAFTECCQAADKAACLLPKLDELRDEGKASSAKQRLKCASLQKFGERAFKAWAVARLSQRFPKAEFAEVSKLVTDLTKVHTECCHGDLLECADDRADLAKYICENQDSISSKLKECCEKPLLEKSHCIAEVENDEMPADLPSLAADFVESKDVCKNYAEAKDVFLGMFLYEYARRHPDYSVVLLLRLAKTYETTLEKCCAAADPHECYAKVFDEFKPLVEEPQNLIKQNCELFEQLGEYKFQNALLVRYTKKVPQVSTPTLVEVSRNLGKVGSKCCKHPEAKRMPCAEDYLSVVLNQLCVLHEKTPVSDRVTKCCTESLVNRRPCFSALEVDETYVPKEFNAETFTFHADICTLSEKERQIKKQTALVELVKHKPKATKEQLKAVMDDFAAFVEKCCKADDKETCFAEEGKKLVAASQAALGL

SEQ ID NO: 444 - protein, 995 aa, Artificial Sequence
  hCPN1 variant
VTFRHHRYDDLVRTLYKVQNECPGITRVYSIGRSVEGRHLYVLEFSDHPGIHEPLEPEVKYVGNMHGNEALGRELMLQLSEFLCEEFRNRNQRIVQLIQDTRIHILPSMNPDGYEVAAAQGPNKPGYLVGRNNANGVDLNRNFPDLNTYIYYNEKYGGPNHHLPLPDNWKSQVEPETRAVIRWMHSFNFVLSANLHGGAVVANYPYDKSFEHRVRGVRRTASTPTPDDKLFQKLAKVYSYAHWWMLYGLSCGNYFPDGITNGASWYSLSKGMQDFNYLHTNCFEITLELSCDKFPPEEELQREWLGNREALIQFLEQVHQGIKGMVLDENYNNLANAVISVSGINHDVTSGDHGDYFRLLLPGIYTVSATAPGYDPETVTVTVGPAEPTLVNFHLKRSGSSGGSSGGSSGDAHKSEVAHRFKDLGEENFKALVLIAFAQYLQQCPFEDHVKLVNEVTEFAKTCVADESAENCDKSLHTLFGDKLCTVATLRETYGEMADCCAKQEPERNECFLQHKDDNPNLPRLVRPEVDVMCTAFHDNEETFLKKYLYEIARRHPYFYAPELLFFAKRYKAAFTECCQAADKAACLLPKLDELRDEGKASSAKQRLKCASLQKFGERAFKAWAVARLSQRFPKAEFAEVSKLVTDLTKVHTECCHGDLLECADDRADLAKYICENQDSISSKLKECCEKPLLEKSHCIAEVENDEMPADLPSLAADFVESKDVCKNYAEAKDVFLGMFLYEYARRHPDYSVVLLLRLAKTYETTLEKCCAAADPHECYAKVFDEFKPLVEEPQNLIKQNCELFEQLGEYKFQNALLVRYTKKVPQVSTPTLVEVSRNLGKVGSKCCKHPEAKRMPCAEDYLSVVLNQLCVLHEKTPVSDRVTKCCTESLVNRRPCFSALEVDETYVPKEFNAETFTFHADICTLSEKERQIKKQTALVELVKHKPKATKEQLKAVMDDFAAFVEKCCKADDKETCFAEEGKKLVAASQAALGL

SEQ ID NO: 445 - protein, 995 aa, Artificial Sequence
  hCPN1 variant
VTFRHHRYDDLVRTLYKVQNECPGITRVYSIGRSVEGRHLYVLEFSDHPGIHEPLEPEVKYVGNMHGNEALGRELMLQLSEFLCEEFRNRNQRIVQLIQDTRIHILPSMNPDGYEVAAAQGPNKPGYLVGRNNANGVDLNRNFPDLNTYIYYNEKYGGPNHHLPLPDNWKSQVEPETRAVIRWMHSFNFVLSANLHGGAVVANYPYDKSFEHRVRGVRRTASTPTPDDKLFQKLAKVYSYAHWDMRFGLSCGNYFPDGITNGASWYSLSKGMQDFNYLHTNCFEITLELSCDKFPPEEELQREWLGNREALIQFLEQVHQGIKGMVLDENYNNLANAVISVSGINHDVTSGDHGDYFRLLLPGIYTVSATAPGYDPETVTVTVGPAEPTLVNFHLKRSGSSGGSSGGSSGDAHKSEVAHRFKDLGEENFKALVLIAFAQYLQQCPFEDHVKLVNEVTEFAKTCVADESAENCDKSLHTLFGDKLCTVATLRETYGEMADCCAKQEPERNECFLQHKDDNPNLPRLVRPEVDVMCTAFHDNEETFLKKYLYEIARRHPYFYAPELLFFAKRYKAAFTECCQAADKAACLLPKLDELRDEGKASSAKQRLKCASLQKFGERAFKAWAVARLSQRFPKAEFAEVSKLVTDLTKVHTECCHGDLLECADDRADLAKYICENQDSISSKLKECCEKPLLEKSHCIAEVENDEMPADLPSLAADFVESKDVCKNYAEAKDVFLGMFLYEYARRHPDYSVVLLLRLAKTYETTLEKCCAAADPHECYAKVFDEFKPLVEEPQNLIKQNCELFEQLGEYKFQNALLVRYTKKVPQVSTPTLVEVSRNLGKVGSKCCKHPEAKRMPCAEDYLSVVLNQLCVLHEKTPVSDRVTKCCTESLVNRRPCFSALEVDETYVPKEFNAETFTFHADICTLSEKERQIKKQTALVELVKHKPKATKEQLKAVMDDFAAFVEKCCKADDKETCFAEEGKKLVAASQAALGL

SEQ ID NO: 446 - protein, 995 aa, Artificial Sequence
  hCPN1 variant
VTFRHHRYDDLVRTLYKVQNECPGITRVYSIGRSVEGRHLYVLEFSDHPGIHEPLEPEVKYVGNMHGNEALGRELMLQLSEFLCEEFRNRNQRIVQLIQDTRIHILPSMNPDGYEVAAAQGPNKPGYLVGRNNANGVDLNRNFPDLNTYIYYNEKYGGPNHHLPLPDNWKSQVEPETRAVIRWMHSFNFVLSANLHGGAVVANYPYDKSFEHRVRGVRRTASTPTPDDKLFQKLAKVYSYAHWWMFYGLSCGNYFPDGITNGASWYSLSKGMQDFNYLHTNCFEITLELSCDKFPPEEELQREWLGNREALIQFLEQVHQGIKGMVLDENYNNLANAVISVSGINHDVTSGDHGDYFRLLLPGIYTVSATAPGYDPETVTVTVGPAEPTLVNFHLKRSGSSGGSSGGSSGDAHKSEVAHRFKDLGEENFKALVLIAFAQYLQQCPFEDHVKLVNEVTEFAKTCVADESAENCDKSLHTLFGDKLCTVATLRETYGEMADCCAKQEPERNECFLQHKDDNPNLPRLVRPEVDVMCTAFHDNEETFLKKYLYEIARRHPYFYAPELLFFAKRYKAAFTECCQAADKAACLLPKLDELRDEGKASSAKQRLKCASLQKFGERAFKAWAVARLSQRFPKAEFAEVSKLVTDLTKVHTECCHGDLLECADDRADLAKYICENQDSISSKLKECCEKPLLEKSHCIAEVENDEMPADLPSLAADFVESKDVCKNYAEAKDVFLGMFLYEYARRHPDYSVVLLLRLAKTYETTLEKCCAAADPHECYAKVFDEFKPLVEEPQNLIKQNCELFEQLGEYKFQNALLVRYTKKVPQVSTPTLVEVSRNLGKVGSKCCKHPEAKRMPCAEDYLSVVLNQLCVLHEKTPVSDRVTKCCTESLVNRRPCFSALEVDETYVPKEFNAETFTFHADICTLSEKERQIKKQTALVELVKHKPKATKEQLKAVMDDFAAFVEKCCKADDKETCFAEEGKKLVAASQAALGL

SEQ ID NO: 447 - protein, 995 aa, Artificial Sequence
  hCPN1 variant
VTFRHHRYDDLVRTLYKVQNECPGITRVYSIGRSVEGRHLYVLEFSDHPGIHEPLEPEVKYVGNMHGNEALGRELMLQLSEFLCEEFRNRNQRIVQLIQDTRIHILPSMNPDGYEVAAAQGPNKPGYLVGRNNANGVDLNRNFPDLNTYIYYNEKYGGPNHHLPLPDNWKSQVEPETRAVIRWMHSFNFVLSANLHGGAVVANYPYDKSFEHRVRGVRRTASTPTPDDKLFQKLAKVYSYAHWWMRFGLSCGNYFPDGITNGASWYSLSKGMQDFNYLHTNCFEITLELSCDKFPPEEELQREWLGNREALIQFLEQVHQGIKGMVLDENYNNLANAVISVSGINHDVTSGDHGDYFRLLLPGIYTVSATAPGYDPETVTVTVGPAEPTLVNFHLKRSGSSGGSSGGSSGDAHKSEVAHRFKDLGEENFKALVLIAFAQYLQQCPFEDHVKLVNEVTEFAKTCVADESAENCDKSLHTLFGDKLCTVATLRETYGEMADCCAKQEPERNECFLQHKDDNPNLPRLVRPEVDVMCTAFHDNEETFLKKYLYEIARRHPYFYAPELLFFAKRYKAAFTECCQAADKAACLLPKLDELRDEGKASSAKQRLKCASLQKFGERAFKAWAVARLSQRFPKAEFAEVSKLVTDLTKVHTECCHGDLLECADDRADLAKYICENQDSISSKLKECCEKPLLEKSHCIAEVENDEMPADLPSLAADFVESKDVCKNYAEAKDVFLGMFLYEYARRHPDYSVVLLLRLAKTYETTLEKCCAAADPHECYAKVFDEFKPLVEEPQNLIKQNCELFEQLGEYKFQNALLVRYTKKVPQVSTPTLVEVSRNLGKVGSKCCKHPEAKRMPCAEDYLSVVLNQLCVLHEKTPVSDRVTKCCTESLVNRRPCFSALEVDETYVPKEFNAETFTFHADICTLSEKERQIKKQTALVELVKHKPKATKEQLKAVMDDFAAFVEKCCKADDKETCFAEEGKKLVAASQAALGL

SEQ ID NO: 448 - protein, 995 aa, Artificial Sequence
  hCPN1 variant
VTFRHHRYDDLVRTLYKVQNECPGITRVYSIGRSVEGRHLYVLEFSDHPGIHEPLEPEVKYVGNMHGNEALGRELMLQLSEFLCEEFRNRNQRIVQLIQDTRIHILPSMNPDGYEVAAAQGPNKPGYLVGRNNANGVDLNRNFPDLNTYIYYNEKYGGPNHHLPLPDNWKSQVEPETRAVIRWMHSFNFVLSANLHGGAVVANYPYDKSFEHRVRGVRRTASTPTPDDKLFQKLAKVYSYAHWDMWYGFSCGNYFPDGITNGASWYSLSKGMQDFNYLHTNCFEITLELSCDKFPPEEELQREWLGNREALIQFLEQVHQGIKGMVLDENYNNLANAVISVSGINHDVTSGDHGDYFRLLLPGIYTVSATAPGYDPETVTVTVGPAEPTLVNFHLKRSGSSGGSSGGSSGDAHKSEVAHRFKDLGEENFKALVLIAFAQYLQQCPFEDHVKLVNEVTEFAKTCVADESAENCDKSLHTLFGDKLCTVATLRETYGEMADCCAKQEPERNECFLQHKDDNPNLPRLVRPEVDVMCTAFHDNEETFLKKYLYEIARRHPYFYAPELLFFAKRYKAAFTECCQAADKAACLLPKLDELRDEGKASSAKQRLKCASLQKFGERAFKAWAVARLSQRFPKAEFAEVSKLVTDLTKVHTECCHGDLLECADDRADLAKYICENQDSISSKLKECCEKPLLEKSHCIAEVENDEMPADLPSLAADFVESKDVCKNYAEAKDVFLGMFLYEYARRHPDYSVVLLLRLAKTYETTLEKCCAAADPHECYAKVFDEFKPLVEEPQNLIKQNCELFEQLGEYKFQNALLVRYTKKVPQVSTPTLVEVSRNLGKVGSKCCKHPEAKRMPCAEDYLSVVLNQLCVLHEKTPVSDRVTKCCTESLVNRRPCFSALEVDETYVPKEFNAETFTFHADICTLSEKERQIKKQTALVELVKHKPKATKEQLKAVMDDFAAFVEKCCKADDKETCFAEEGKKLVAASQAALGL

SEQ ID NO: 449 - protein, 995 aa, Artificial Sequence
  hCPN1 variant
VTFRHHRYDDLVRTLYKVQNECPGITRVYSIGRSVEGRHLYVLEFSDHPGIHEPLEPEVKYVGNMHGNEALGRELMLQLSEFLCEEFRNRNQRIVQLIQDTRIHILPSMNPDGYEVAAAQGPNKPGYLVGRNNANGVDLNRNFPDLNTYIYYNEKYGGPNHHLPLPDNWKSQVEPETRAVIRWMHSFNFVLSANLHGGAVVANYPYDKSFEHRVRGVRRTASTPTPDDKLFQKLAKVYSYAHGWMFQGWNCGDYFPDGITNGASWYSLSKGMQDFNYLHTNCFEITLELSCDKFPPEEELQEEWLANREALIQFLEQVHQGIKGMVLDENYNNLANAVISVSGINHDVTSGDHGDYFRLLLPGIYTVSATAPGYDPETVTVTVGPAEPTLVNFHLKRSGSSGGSSGGSSGDAHKSEVAHRFKDLGEENFKALVLIAFAQYLQQCPFEDHVKLVNEVTEFAKTCVADESAENCDKSLHTLFGDKLCTVATLRETYGEMADCCAKQEPERNECFLQHKDDNPNLPRLVRPEVDVMCTAFHDNEETFLKKYLYEIARRHPYFYAPELLFFAKRYKAAFTECCQAADKAACLLPKLDELRDEGKASSAKQRLKCASLQKFGERAFKAWAVARLSQRFPKAEFAEVSKLVTDLTKVHTECCHGDLLECADDRADLAKYICENQDSISSKLKECCEKPLLEKSHCIAEVENDEMPADLPSLAADFVESKDVCKNYAEAKDVFLGMFLYEYARRHPDYSVVLLLRLAKTYETTLEKCCAAADPHECYAKVFDEFKPLVEEPQNLIKQNCELFEQLGEYKFQNALLVRYTKKVPQVSTPTLVEVSRNLGKVGSKCCKHPEAKRMPCAEDYLSVVLNQLCVLHEKTPVSDRVTKCCTESLVNRRPCFSALEVDETYVPKEFNAETFTFHADICTLSEKERQIKKQTALVELVKHKPKATKEQLKAVMDDFAAFVEKCCKADDKETCFAEEGKKLVAASQAALGL

SEQ ID NO: 450 - protein, 995 aa, Artificial Sequence
  hCPN1 variant
VTFRHHRYDDLVRTLYKVQNECPGITRVYSIGRSVEGRHLYVLEFSDHPGIHEPLEPEVKYVGNMHGNEALGRELMLQLSEFLCEEFRNRNQRIVQLIQDTRIHILPSMNPDGYEVAAAQGPNKPGYLVGRNNANGVDLNRNFPDLNTYIYYNEKYGGPNHHLPLPDNWKSQVEPETRAVIRWMHSFNFVLSANLHGGAVVANYPYDKSFEHRVRGVRRTASTPTPDDKLFQKLAKVYSYAHGWMFQGWNCGDYFPDGITNGASWYSLSKGMQDFNYLHTNCFEITLELSCDKFPPEEELQREWLQNREALIQFLEQVHQGIKGMVLDENYNNLANAVISVSGINHDVTSGDHGDYFRLLLPGIYTVSATAPGYDPETVTVTVGPAEPTLVNFHLKRSGSSGGSSGGSSGDAHKSEVAHRFKDLGEENFKALVLIAFAQYLQQCPFEDHVKLVNEVTEFAKTCVADESAENCDKSLHTLFGDKLCTVATLRETYGEMADCCAKQEPERNECFLQHKDDNPNLPRLVRPEVDVMCTAFHDNEETFLKKYLYEIARRHPYFYAPELLFFAKRYKAAFTECCQAADKAACLLPKLDELRDEGKASSAKQRLKCASLQKFGERAFKAWAVARLSQRFPKAEFAEVSKLVTDLTKVHTECCHGDLLECADDRADLAKYICENQDSISSKLKECCEKPLLEKSHCIAEVENDEMPADLPSLAADFVESKDVCKNYAEAKDVFLGMFLYEYARRHPDYSVVLLLRLAKTYETTLEKCCAAADPHECYAKVFDEFKPLVEEPQNLIKQNCELFEQLGEYKFQNALLVRYTKKVPQVSTPTLVEVSRNLGKVGSKCCKHPEAKRMPCAEDYLSVVLNQLCVLHEKTPVSDRVTKCCTESLVNRRPCFSALEVDETYVPKEFNAETFTFHADICTLSEKERQIKKQTALVELVKHKPKATKEQLKAVMDDFAAFVEKCCKADDKETCFAEEGKKLVAASQAALGL

SEQ ID NO: 451 - protein, 995 aa, Artificial Sequence
  hCPN1 variant
VTFRHHRYDDLVRTLYKVQNECPGITRVYSIGRSVEGRHLYVLEFSDHPGIHEPLEPEVKYVGNMHGNEALGRELMLQLSEFLCEEFRNRNQRIVQLIQDTRIHILPSMNPDGYEVAAAQGPNKPGYLVGRNNANGVDLNRNFPDLNTYIYYNEKYGGPNHHLPLPDNWKSQVEPETRAVIRWMHSFNFVLSANLHGGAVVANYPYDKSFEHRVRGVRRTASTPTPDDKLFQKLAKVYSYAHGWMFQGWNCGDYFPDGITNGASWYSLSKGMQDFNYLHTNCFEITLELSCDKFPPEEELQEEWLTNREALIQFLEQVHQGIKGMVLDENYNNLANAVISVSGINHDVTSGDHGDYFRLLLPGIYTVSATAPGYDPETVTVTVGPAEPTLVNFHLKRSGSSGGSSGGSSGDAHKSEVAHRFKDLGEENFKALVLIAFAQYLQQCPFEDHVKLVNEVTEFAKTCVADESAENCDKSLHTLFGDKLCTVATLRETYGEMADCCAKQEPERNECFLQHKDDNPNLPRLVRPEVDVMCTAFHDNEETFLKKYLYEIARRHPYFYAPELLFFAKRYKAAFTECCQAADKAACLLPKLDELRDEGKASSAKQRLKCASLQKFGERAFKAWAVARLSQRFPKAEFAEVSKLVTDLTKVHTECCHGDLLECADDRADLAKYICENQDSISSKLKECCEKPLLEKSHCIAEVENDEMPADLPSLAADFVESKDVCKNYAEAKDVFLGMFLYEYARRHPDYSVVLLLRLAKTYETTLEKCCAAADPHECYAKVFDEFKPLVEEPQNLIKQNCELFEQLGEYKFQNALLVRYTKKVPQVSTPTLVEVSRNLGKVGSKCCKHPEAKRMPCAEDYLSVVLNQLCVLHEKTPVSDRVTKCCTESLVNRRPCFSALEVDETYVPKEFNAETFTFHADICTLSEKERQIKKQTALVELVKHKPKATKEQLKAVMDDFAAFVEKCCKADDKETCFAEEGKKLVAASQAALGL

SEQ ID NO: 452 - protein, 995 aa, Artificial Sequence
  hCPN1 variant
VTFRHHRYDDLVRTLYKVQNECPGITRVYSIGRSVEGRHLYVLEFSDHPGIHEPLEPEVKYVGNMHGNEALGRELMLQLSEFLCEEFRNRNQRIVQLIQDTRIHILPSMNPDGYEVAAAQGPNKPGYLVGRNNANGVDLNRNFPDLNTYIYYNEKYGGPNHHLPLPDNWKSQVEPETRAVIRWMHSFNFVLSANLHGGAVVANYPYDKSFEHRVRGVRRTASTPTPDDKLFQKLAKVYSYAHGWMFQGWNCGDYFPDGITNGASWYSLSKGMQDFNYLHTNCFEITLELSCIKFPPEEELQLEWLHNREALIQFLEQVHQGIKGMVLDENYNNLANAVISVSGINHDVTSGDHGDYFRLLLPGIYTVSATAPGYDPETVTVTVGPAEPTLVNFHLKRSGSSGGSSGGSSGDAHKSEVAHRFKDLGEENFKALVLIAFAQYLQQCPFEDHVKLVNEVTEFAKTCVADESAENCDKSLHTLFGDKLCTVATLRETYGEMADCCAKQEPERNECFLQHKDDNPNLPRLVRPEVDVMCTAFHDNEETFLKKYLYEIARRHPYFYAPELLFFAKRYKAAFTECCQAADKAACLLPKLDELRDEGKASSAKQRLKCASLQKFGERAFKAWAVARLSQRFPKAEFAEVSKLVTDLTKVHTECCHGDLLECADDRADLAKYICENQDSISSKLKECCEKPLLEKSHCIAEVENDEMPADLPSLAADFVESKDVCKNYAEAKDVFLGMFLYEYARRHPDYSVVLLLRLAKTYETTLEKCCAAADPHECYAKVFDEFKPLVEEPQNLIKQNCELFEQLGEYKFQNALLVRYTKKVPQVSTPTLVEVSRNLGKVGSKCCKHPEAKRMPCAEDYLSVVLNQLCVLHEKTPVSDRVTKCCTESLVNRRPCFSALEVDETYVPKEFNAETFTFHADICTLSEKERQIKKQTALVELVKHKPKATKEQLKAVMDDFAAFVEKCCKADDKETCFAEEGKKLVAASQAALGL

SEQ ID NO: 453 - protein, 995 aa, Artificial Sequence
  hCPN1 variant
VTFRHHRYDDLVRTLYKVQNECPGITRVYSIGRSVEGRHLYVLEFSDHPGIHEPLEPEVKYVGNMHGNEALGRELMLQLSEFLCEEFRNRNQRIVQLIQDTRIHILPSMNPDGYEVAAAQGPNKPGYLVGRNNANGVDLNRNFPDLNTYIYYNEKYGGPNHHLPLPDNWKSQVEPETRAVIRWMHSFNFVLSANLHGGAVVANYPYDKSFEHRVRGVRRTASTPTPDDKLFQKLAKVYSYAHGWMFQGWNCGDYFPDGITNGASWYSLSKGMQDFNYLHTNCFEITLELSCDKFPPEEELQREWLNNREALIQFLEQVHQGIKGMVLDENYNNLANAVISVSGINHDVTSGDHGDYFRLLLPGIYTVSATAPGYDPETVTVTVGPAEPTLVNFHLKRSGSSGGSSGGSSGDAHKSEVAHRFKDLGEENFKALVLIAFAQYLQQCPFEDHVKLVNEVTEFAKTCVADESAENCDKSLHTLFGDKLCTVATLRETYGEMADCCAKQEPERNECFLQHKDDNPNLPRLVRPEVDVMCTAFHDNEETFLKKYLYEIARRHPYFYAPELLFFAKRYKAAFTECCQAADKAACLLPKLDELRDEGKASSAKQRLKCASLQKFGERAFKAWAVARLSQRFPKAEFAEVSKLVTDLTKVHTECCHGDLLECADDRADLAKYICENQDSISSKLKECCEKPLLEKSHCIAEVENDEMPADLPSLAADFVESKDVCKNYAEAKDVFLGMFLYEYARRHPDYSVVLLLRLAKTYETTLEKCCAAADPHECYAKVFDEFKPLVEEPQNLIKQNCELFEQLGEYKFQNALLVRYTKKVPQVSTPTLVEVSRNLGKVGSKCCKHPEAKRMPCAEDYLSVVLNQLCVLHEKTPVSDRVTKCCTESLVNRRPCFSALEVDETYVPKEFNAETFTFHADICTLSEKERQIKKQTALVELVKHKPKATKEQLKAVMDDFAAFVEKCCKADDKETCFAEEGKKLVAASQAALGL

SEQ ID NO: 454 - protein, 995 aa, Artificial Sequence
  hCPN1 variant
VTFRHHRYDDLVRTLYKVQNECPGITRVYSIGRSVEGRHLYVLEFSDHPGIHEPLEPEVKYVGNMHGNEALGRELMLQLSEFLCEEFRNRNQRIVQLIQDTRIHILPSMNPDGYEVAAAQGPNKPGYLVGRNNANGVDLNRNFPDLNTYIYYNEKYGGPNHHLPLPDNWKSQVEPETRAVIRWMHSFNFVLSANLHGGAVVANYPYDKSFEHRVRGVRRTASTPTPDDKLFQKLAKVYSYAHGWMFQGWNCGDYFPDGITNGASWYSLSKGMQDFNYLHTNCFEITLELSCIKFPPEEELQQEWLDNREALIQFLEQVHQGIKGMVLDENYNNLANAVISVSGINHDVTSGDHGDYFRLLLPGIYTVSATAPGYDPETVTVTVGPAEPTLVNFHLKRSGSSGGSSGGSSGDAHKSEVAHRFKDLGEENFKALVLIAFAQYLQQCPFEDHVKLVNEVTEFAKTCVADESAENCDKSLHTLFGDKLCTVATLRETYGEMADCCAKQEPERNECFLQHKDDNPNLPRLVRPEVDVMCTAFHDNEETFLKKYLYEIARRHPYFYAPELLFFAKRYKAAFTECCQAADKAACLLPKLDELRDEGKASSAKQRLKCASLQKFGERAFKAWAVARLSQRFPKAEFAEVSKLVTDLTKVHTECCHGDLLECADDRADLAKYICENQDSISSKLKECCEKPLLEKSHCIAEVENDEMPADLPSLAADFVESKDVCKNYAEAKDVFLGMFLYEYARRHPDYSVVLLLRLAKTYETTLEKCCAAADPHECYAKVFDEFKPLVEEPQNLIKQNCELFEQLGEYKFQNALLVRYTKKVPQVSTPTLVEVSRNLGKVGSKCCKHPEAKRMPCAEDYLSVVLNQLCVLHEKTPVSDRVTKCCTESLVNRRPCFSALEVDETYVPKEFNAETFTFHADICTLSEKERQIKKQTALVELVKHKPKATKEQLKAVMDDFAAFVEKCCKADDKETCFAEEGKKLVAASQAALGL

SEQ ID NO: 455 - protein, 995 aa, Artificial Sequence
  hCPN1 variant
VTFRHHRYDDLVRTLYKVQNECPGITRVYSIGRSVEGRHLYVLEFSDHPGIHEPLEPEVKYVGNMHGNEALGRELMLQLSEFLCEEFRNRNQRIVQLIQDTRIHILPSMNPDGYEVAAAQGPNKPGYLVGRNNANGVDLNRNFPDLNTYIYYNEKYGGPNHHLPLPDNWKSQVEPETRAVIRWMHSFNFVLSANLHGGAVVANYPYDKSFEHRVRGVRRTASTPTPDDKLFQKLAKVYSYAHGWMFQGWNCGDYFPDGITNGASWYSLSKGMQDFNYLHTNCFEITLELSCDKFPPEEELQEEWLNNREALIQFLEQVHQGIKGMVLDENYNNLANAVISVSGINHDVTSGDHGDYFRLLLPGIYTVSATAPGYDPETVTVTVGPAEPTLVNFHLKRSGSSGGSSGGSSGDAHKSEVAHRFKDLGEENFKALVLIAFAQYLQQCPFEDHVKLVNEVTEFAKTCVADESAENCDKSLHTLFGDKLCTVATLRETYGEMADCCAKQEPERNECFLQHKDDNPNLPRLVRPEVDVMCTAFHDNEETFLKKYLYEIARRHPYFYAPELLFFAKRYKAAFTECCQAADKAACLLPKLDELRDEGKASSAKQRLKCASLQKFGERAFKAWAVARLSQRFPKAEFAEVSKLVTDLTKVHTECCHGDLLECADDRADLAKYICENQDSISSKLKECCEKPLLEKSHCIAEVENDEMPADLPSLAADFVESKDVCKNYAEAKDVFLGMFLYEYARRHPDYSVVLLLRLAKTYETTLEKCCAAADPHECYAKVFDEFKPLVEEPQNLIKQNCELFEQLGEYKFQNALLVRYTKKVPQVSTPTLVEVSRNLGKVGSKCCKHPEAKRMPCAEDYLSVVLNQLCVLHEKTPVSDRVTKCCTESLVNRRPCFSALEVDETYVPKEFNAETFTFHADICTLSEKERQIKKQTALVELVKHKPKATKEQLKAVMDDFAAFVEKCCKADDKETCFAEEGKKLVAASQAALGL

SEQ ID NO: 456 - protein, 995 aa, Artificial Sequence
  hCPN1 variant
VTFRHHRYDDLVRTLYKVQNECPGITRVYSIGRSVEGRHLYVLEFSDHPGIHEPLEPEVKYVGNMHGNEALGRELMLQLSEFLCEEFRNRNQRIVQLIQDTRIHILPSMNPDGYEVAAAQGPNKPGYLVGRNNANGVDLNRNFPDLNTYIYYNEKYGGPNHHLPLPDNWKSQVEPETRAVIRWMHSFNFVLSANLHGGAVVANYPYDKSFEHRVRGVRRTASTPTPDDKLFQKLAKVYSYAHGWMFQGWNCGDYFPDGITNGASWYSLSKGMQDFNYLHTNCFEITLELSCIKFPPEEELQREWLNNREALIQFLEQVHQGIKGMVLDENYNNLANAVISVSGINHDVTSGDHGDYFRLLLPGIYTVSATAPGYDPETVTVTVGPAEPTLVNFHLKRSGSSGGSSGGSSGDAHKSEVAHRFKDLGEENFKALVLIAFAQYLQQCPFEDHVKLVNEVTEFAKTCVADESAENCDKSLHTLFGDKLCTVATLRETYGEMADCCAKQEPERNECFLQHKDDNPNLPRLVRPEVDVMCTAFHDNEETFLKKYLYEIARRHPYFYAPELLFFAKRYKAAFTECCQAADKAACLLPKLDELRDEGKASSAKQRLKCASLQKFGERAFKAWAVARLSQRFPKAEFAEVSKLVTDLTKVHTECCHGDLLECADDRADLAKYICENQDSISSKLKECCEKPLLEKSHCIAEVENDEMPADLPSLAADFVESKDVCKNYAEAKDVFLGMFLYEYARRHPDYSVVLLLRLAKTYETTLEKCCAAADPHECYAKVFDEFKPLVEEPQNLIKQNCELFEQLGEYKFQNALLVRYTKKVPQVSTPTLVEVSRNLGKVGSKCCKHPEAKRMPCAEDYLSVVLNQLCVLHEKTPVSDRVTKCCTESLVNRRPCFSALEVDETYVPKEFNAETFTFHADICTLSEKERQIKKQTALVELVKHKPKATKEQLKAVMDDFAAFVEKCCKADDKETCFAEEGKKLVAASQAALGL

SEQ ID NO: 457 - protein, 995 aa, Artificial Sequence
  hCPN1 variant
VTFRHHRYDDLVRTLYKVQNECPGITRVYSIGRSVEGRHLYVLEFSDHPGIHEPLEPEVKYVGNMHGNEALGRELMLQLSEFLCEEFRNRNQRIVQLIQDTRIHILPSMNPDGYEVAAAQGPNKPGYLVGRNNANGVDLNRNFPDLNTYIYYNEKYGGPNHHLPLPDNWKSQVEPETRAVIRWMHSFNFVLSANLHGGAVVANYPYDKSFEHRVRGVRRTASTPTPDDKLFQKLAKVYSYAHGWMFQGWNCGDYFPDGITNGASWYSLSKGMQDFNYLHTNCFEITLELSCDKFPPEEELQREWLFNREALIQFLEQVHQGIKGMVLDENYNNLANAVISVSGINHDVTSGDHGDYFRLLLPGIYTVSATAPGYDPETVTVTVGPAEPTLVNFHLKRSGSSGGSSGGSSGDAHKSEVAHRFKDLGEENFKALVLIAFAQYLQQCPFEDHVKLVNEVTEFAKTCVADESAENCDKSLHTLFGDKLCTVATLRETYGEMADCCAKQEPERNECFLQHKDDNPNLPRLVRPEVDVMCTAFHDNEETFLKKYLYEIARRHPYFYAPELLFFAKRYKAAFTECCQAADKAACLLPKLDELRDEGKASSAKQRLKCASLQKFGERAFKAWAVARLSQRFPKAEFAEVSKLVTDLTKVHTECCHGDLLECADDRADLAKYICENQDSISSKLKECCEKPLLEKSHCIAEVENDEMPADLPSLAADFVESKDVCKNYAEAKDVFLGMFLYEYARRHPDYSVVLLLRLAKTYETTLEKCCAAADPHECYAKVFDEFKPLVEEPQNLIKQNCELFEQLGEYKFQNALLVRYTKKVPQVSTPTLVEVSRNLGKVGSKCCKHPEAKRMPCAEDYLSVVLNQLCVLHEKTPVSDRVTKCCTESLVNRRPCFSALEVDETYVPKEFNAETFTFHADICTLSEKERQIKKQTALVELVKHKPKATKEQLKAVMDDFAAFVEKCCKADDKETCFAEEGKKLVAASQAALGL

SEQ ID NO: 458 - protein, 995 aa, Artificial Sequence
  hCPN1 variant
VTFRHHRYDDLVRTLYKVQNECPGITRVYSIGRSVEGRHLYVLEFSDHPGIHEPLEPEVKYVGNMHGNEALGRELMLQLSEFLCEEFRNRNQRIVQLIQDTRIHILPSMNPDGYEVAAAQGPNKPGYLVGRNNANGVDLNRNFPDLNTYIYYNEKYGGPNHHLPLPDNWKSQVEPETRAVIRWMHSFNFVLSANLHGGAVVANYPYDKSFEHRVRGVRRTASTPTPDDKLFQKLAKVYSYAHGWMFQGWNCGDYFPDGITNGASWYSLSKGMQDFNYLHTNCFEITLELSCIKFPPEEELQLEWLWNREALIQFLEQVHQGIKGMVLDENYNNLANAVISVSGINHDVTSGDHGDYFRLLLPGIYTVSATAPGYDPETVTVTVGPAEPTLVNFHLKRSGSSGGSSGGSSGDAHKSEVAHRFKDLGEENFKALVLIAFAQYLQQCPFEDHVKLVNEVTEFAKTCVADESAENCDKSLHTLFGDKLCTVATLRETYGEMADCCAKQEPERNECFLQHKDDNPNLPRLVRPEVDVMCTAFHDNEETFLKKYLYEIARRHPYFYAPELLFFAKRYKAAFTECCQAADKAACLLPKLDELRDEGKASSAKQRLKCASLQKFGERAFKAWAVARLSQRFPKAEFAEVSKLVTDLTKVHTECCHGDLLECADDRADLAKYICENQDSISSKLKECCEKPLLEKSHCIAEVENDEMPADLPSLAADFVESKDVCKNYAEAKDVFLGMFLYEYARRHPDYSVVLLLRLAKTYETTLEKCCAAADPHECYAKVFDEFKPLVEEPQNLIKQNCELFEQLGEYKFQNALLVRYTKKVPQVSTPTLVEVSRNLGKVGSKCCKHPEAKRMPCAEDYLSVVLNQLCVLHEKTPVSDRVTKCCTESLVNRRPCFSALEVDETYVPKEFNAETFTFHADICTLSEKERQIKKQTALVELVKHKPKATKEQLKAVMDDFAAFVEKCCKADDKETCFAEEGKKLVAASQAALGL

SEQ ID NO: 459 - protein, 995 aa, Artificial Sequence
  hCPN1 variant
VTFRHHRYDDLVRTLYKVQNECPGITRVYSIGRSVEGRHLYVLEFSDHPGIHEPLEPEVKYVGNMHGNEALGRELMLQLSEFLCEEFRNRNQRIVQLIQDTRIHILPSMNPDGYEVAAAQGPNKPGYLVGRNNANGVDLNRNFPDLNTYIYYNEKYGGPNHHLPLPDNWKSQVEPETRAVIRWMHSFNFVLSANLHGGAVVANYPYDKSFEHRVRGVRRTASTPTPDDKLFQKLAKVYSYAHGWMFQGWNCGDYFPDGITNGASWYSLSKGMQDFNYLHTNCFEITLELSCIKFPPEEELQDEWLHNREALIQFLEQVHQGIKGMVLDENYNNLANAVISVSGINHDVTSGDHGDYFRLLLPGIYTVSATAPGYDPETVTVTVGPAEPTLVNFHLKRSGSSGGSSGGSSGDAHKSEVAHRFKDLGEENFKALVLIAFAQYLQQCPFEDHVKLVNEVTEFAKTCVADESAENCDKSLHTLFGDKLCTVATLRETYGEMADCCAKQEPERNECFLQHKDDNPNLPRLVRPEVDVMCTAFHDNEETFLKKYLYEIARRHPYFYAPELLFFAKRYKAAFTECCQAADKAACLLPKLDELRDEGKASSAKQRLKCASLQKFGERAFKAWAVARLSQRFPKAEFAEVSKLVTDLTKVHTECCHGDLLECADDRADLAKYICENQDSISSKLKECCEKPLLEKSHCIAEVENDEMPADLPSLAADFVESKDVCKNYAEAKDVFLGMFLYEYARRHPDYSVVLLLRLAKTYETTLEKCCAAADPHECYAKVFDEFKPLVEEPQNLIKQNCELFEQLGEYKFQNALLVRYTKKVPQVSTPTLVEVSRNLGKVGSKCCKHPEAKRMPCAEDYLSVVLNQLCVLHEKTPVSDRVTKCCTESLVNRRPCFSALEVDETYVPKEFNAETFTFHADICTLSEKERQIKKQTALVELVKHKPKATKEQLKAVMDDFAAFVEKCCKADDKETCFAEEGKKLVAASQAALGL

SEQ ID NO: 460 - protein, 995 aa, Artificial Sequence
  hCPN1 variant
VTFRHHRYDDLVRTLYKVQNECPGITRVYSIGRSVEGRHLYVLEFSDHPGIHEPLEPEVKYVGNMHGNEALGRELMLQLSEFLCEEFRNRNQRIVQLIQDTRIHILPSMNPDGYEVAAAQGPNKPGYLVGRNNANGVDLNRNFPDLNTYIYYNEKYGGPNHHLPLPDNWKSQVEPETRAVIRWMHSFNFVLSANLHGGAVVANYPYDKSFEHRVRGVRRTASTPTPDDKLFQKLAKVYSYAHGWMFQGWNCGDYFPDGITNGASWYSLSKGMQDFNYLHTNCFEITLELSCIKFPPEEELQEEWLHNREALIQFLEQVHQGIKGMVLDENYNNLANAVISVSGINHDVTSGDHGDYFRLLLPGIYTVSATAPGYDPETVTVTVGPAEPTLVNFHLKRSGSSGGSSGGSSGDAHKSEVAHRFKDLGEENFKALVLIAFAQYLQQCPFEDHVKLVNEVTEFAKTCVADESAENCDKSLHTLFGDKLCTVATLRETYGEMADCCAKQEPERNECFLQHKDDNPNLPRLVRPEVDVMCTAFHDNEETFLKKYLYEIARRHPYFYAPELLFFAKRYKAAFTECCQAADKAACLLPKLDELRDEGKASSAKQRLKCASLQKFGERAFKAWAVARLSQRFPKAEFAEVSKLVTDLTKVHTECCHGDLLECADDRADLAKYICENQDSISSKLKECCEKPLLEKSHCIAEVENDEMPADLPSLAADFVESKDVCKNYAEAKDVFLGMFLYEYARRHPDYSVVLLLRLAKTYETTLEKCCAAADPHECYAKVFDEFKPLVEEPQNLIKQNCELFEQLGEYKFQNALLVRYTKKVPQVSTPTLVEVSRNLGKVGSKCCKHPEAKRMPCAEDYLSVVLNQLCVLHEKTPVSDRVTKCCTESLVNRRPCFSALEVDETYVPKEFNAETFTFHADICTLSEKERQIKKQTALVELVKHKPKATKEQLKAVMDDFAAFVEKCCKADDKETCFAEEGKKLVAASQAALGL

SEQ ID NO: 461 - protein, 995 aa, Artificial Sequence
  hCPN1 variant
VTFRHHRYDDLVRTLYKVQNECPGITRVYSIGRSVEGRHLYVLEFSDHPGIHEPLEPEVKYVGNMHGNEALGRELMLQLSEFLCEEFRNRNQRIVQLIQDTRIHILPSMNPDGYEVAAAQGPNKPGETVGRNNANGVDLNRNFPDLNTYIYYNEKYGGPNHHLPLPDNWKSQVEPETRAVIRWMHSFNFVLSANLHGGAVVANYPYDKSFEHRVRGVRRTASTPTPDDKLFQKLAKVYSYAHGWMFQGWNCGDYFPDGITNGASWYSLSKGMQDFNYLHTNCFEITLELSCDKFPPEEELQREWLGNREALIQFLEQVHQGIKGMVLDENYNNLANAVISVSGINHDVTSGDHGDYFRLLLPGIYTVSATAPGYDPETVTVTVGPAEPTLVNFHLKRSGSSGGSSGGSSGDAHKSEVAHRFKDLGEENFKALVLIAFAQYLQQCPFEDHVKLVNEVTEFAKTCVADESAENCDKSLHTLFGDKLCTVATLRETYGEMADCCAKQEPERNECFLQHKDDNPNLPRLVRPEVDVMCTAFHDNEETFLKKYLYEIARRHPYFYAPELLFFAKRYKAAFTECCQAADKAACLLPKLDELRDEGKASSAKQRLKCASLQKFGERAFKAWAVARLSQRFPKAEFAEVSKLVTDLTKVHTECCHGDLLECADDRADLAKYICENQDSISSKLKECCEKPLLEKSHCIAEVENDEMPADLPSLAADFVESKDVCKNYAEAKDVFLGMFLYEYARRHPDYSVVLLLRLAKTYETTLEKCCAAADPHECYAKVFDEFKPLVEEPQNLIKQNCELFEQLGEYKFQNALLVRYTKKVPQVSTPTLVEVSRNLGKVGSKCCKHPEAKRMPCAEDYLSVVLNQLCVLHEKTPVSDRVTKCCTESLVNRRPCFSALEVDETYVPKEFNAETFTFHADICTLSEKERQIKKQTALVELVKHKPKATKEQLKAVMDDFAAFVEKCCKADDKETCFAEEGKKLVAASQAALGL

SEQ ID NO: 462 - protein, 995 aa, Artificial Sequence
  hCPN1 variant
VTFRHHRYDDLVRTLYKVQNECPGITRVYSIGRSVEGRHLYVLEFSDHPGIHEPLEPEVKYVGNMHGNEALGRELMLQLSEFLCEEFRNRNQRIVQLIQDTRIHILPSMNPDGYEVAAAQGPNKPGLTVGRNNANGVDLNRNFPDLNTYIYYNEKYGGPNHHLPLPDNWKSQVEPETRAVIRWMHSFNFVLSANLHGGAVVANYPYDKSFEHRVRGVRRTASTPTPDDKLFQKLAKVYSYAHGWMFQGWNCGDYFPDGITNGASWYSLSKGMQDFNYLHTNCFEITLELSCDKFPPEEELQREWLGNREALIQFLEQVHQGIKGMVLDENYNNLANAVISVSGINHDVTSGDHGDYFRLLLPGIYTVSATAPGYDPETVTVTVGPAEPTLVNFHLKRSGSSGGSSGGSSGDAHKSEVAHRFKDLGEENFKALVLIAFAQYLQQCPFEDHVKLVNEVTEFAKTCVADESAENCDKSLHTLFGDKLCTVATLRETYGEMADCCAKQEPERNECFLQHKDDNPNLPRLVRPEVDVMCTAFHDNEETFLKKYLYEIARRHPYFYAPELLFFAKRYKAAFTECCQAADKAACLLPKLDELRDEGKASSAKQRLKCASLQKFGERAFKAWAVARLSQRFPKAEFAEVSKLVTDLTKVHTECCHGDLLECADDRADLAKYICENQDSISSKLKECCEKPLLEKSHCIAEVENDEMPADLPSLAADFVESKDVCKNYAEAKDVFLGMFLYEYARRHPDYSVVLLLRLAKTYETTLEKCCAAADPHECYAKVFDEFKPLVEEPQNLIKQNCELFEQLGEYKFQNALLVRYTKKVPQVSTPTLVEVSRNLGKVGSKCCKHPEAKRMPCAEDYLSVVLNQLCVLHEKTPVSDRVTKCCTESLVNRRPCFSALEVDETYVPKEFNAETFTFHADICTLSEKERQIKKQTALVELVKHKPKATKEQLKAVMDDFAAFVEKCCKADDKETCFAEEGKKLVAASQAALGL

SEQ ID NO: 463 - protein, 995 aa, Artificial Sequence
  hCPN1 variant
VTFRHHRYDDLVRTLYKVQNECPGITRVYSIGRSVEGRHLYVLEFSDHPGIHEPLEPEVKYVGNMHGNEALGRELMLQLSEFLCEEFRNRNQRIVQLIQDTRIHILPSMNPDGYEVAAAQGPNKPGTEVGRNNANGVDLNRNFPDLNTYIYYNEKYGGPNHHLPLPDNWKSQVEPETRAVIRWMHSFNFVLSANLHGGAVVANYPYDKSFEHRVRGVRRTASTPTPDDKLFQKLAKVYSYAHGWMFQGWNCGDYFPDGITNGASWYSLSKGMQDFNYLHTNCFEITLELSCDKFPPEEELQREWLGNREALIQFLEQVHQGIKGMVLDENYNNLANAVISVSGINHDVTSGDHGDYFRLLLPGIYTVSATAPGYDPETVTVTVGPAEPTLVNFHLKRSGSSGGSSGGSSGDAHKSEVAHRFKDLGEENFKALVLIAFAQYLQQCPFEDHVKLVNEVTEFAKTCVADESAENCDKSLHTLFGDKLCTVATLRETYGEMADCCAKQEPERNECFLQHKDDNPNLPRLVRPEVDVMCTAFHDNEETFLKKYLYEIARRHPYFYAPELLFFAKRYKAAFTECCQAADKAACLLPKLDELRDEGKASSAKQRLKCASLQKFGERAFKAWAVARLSQRFPKAEFAEVSKLVTDLTKVHTECCHGDLLECADDRADLAKYICENQDSISSKLKECCEKPLLEKSHCIAEVENDEMPADLPSLAADFVESKDVCKNYAEAKDVFLGMFLYEYARRHPDYSVVLLLRLAKTYETTLEKCCAAADPHECYAKVFDEFKPLVEEPQNLIKQNCELFEQLGEYKFQNALLVRYTKKVPQVSTPTLVEVSRNLGKVGSKCCKHPEAKRMPCAEDYLSVVLNQLCVLHEKTPVSDRVTKCCTESLVNRRPCFSALEVDETYVPKEFNAETFTFHADICTLSEKERQIKKQTALVELVKHKPKATKEQLKAVMDDFAAFVEKCCKADDKETCFAEEGKKLVAASQAALGL

SEQ ID NO: 464 - protein, 995 aa, Artificial Sequence
  hCPN1 variant
VTFRHHRYDDLVRTLYKVQNECPGITRVYSIGRSVEGRHLYVLEFSDHPGIHEPLEPEVKYVGNMHGNEALGRELMLQLSEFLCEEFRNRNQRIVQLIQDTRIHILPSMNPDGYEVAAAQGPNKPGTTVGRNNANGVDLNRNFPDLNTYIYYNEKYGGPNHHLPLPDNWKSQVEPETRAVIRWMHSFNFVLSANLHGGAVVANYPYDKSFEHRVRGVRRTASTPTPDDKLFQKLAKVYSYAHGWMFQGWNCGDYFPDGITNGASWYSLSKGMQDFNYLHTNCFEITLELSCDKFPPEEELQREWLGNREALIQFLEQVHQGIKGMVLDENYNNLANAVISVSGINHDVTSGDHGDYFRLLLPGIYTVSATAPGYDPETVTVTVGPAEPTLVNFHLKRSGSSGGSSGGSSGDAHKSEVAHRFKDLGEENFKALVLIAFAQYLQQCPFEDHVKLVNEVTEFAKTCVADESAENCDKSLHTLFGDKLCTVATLRETYGEMADCCAKQEPERNECFLQHKDDNPNLPRLVRPEVDVMCTAFHDNEETFLKKYLYEIARRHPYFYAPELLFFAKRYKAAFTECCQAADKAACLLPKLDELRDEGKASSAKQRLKCASLQKFGERAFKAWAVARLSQRFPKAEFAEVSKLVTDLTKVHTECCHGDLLECADDRADLAKYICENQDSISSKLKECCEKPLLEKSHCIAEVENDEMPADLPSLAADFVESKDVCKNYAEAKDVFLGMFLYEYARRHPDYSVVLLLRLAKTYETTLEKCCAAADPHECYAKVFDEFKPLVEEPQNLIKQNCELFEQLGEYKFQNALLVRYTKKVPQVSTPTLVEVSRNLGKVGSKCCKHPEAKRMPCAEDYLSVVLNQLCVLHEKTPVSDRVTKCCTESLVNRRPCFSALEVDETYVPKEFNAETFTFHADICTLSEKERQIKKQTALVELVKHKPKATKEQLKAVMDDFAAFVEKCCKADDKETCFAEEGKKLVAASQAALGL

SEQ ID NO: 465 - protein, 995 aa, Artificial Sequence
  hCPN1 variant
VTFRHHRYDDLVRTLYKVQNECPGITRVYSIGRSVEGRHLYVLEFSDHPGIHEPLEPEVKYVGNMHGNEALGRELMLQLSEFLCEEFRNRNQRIVQLIQDTRIHILPSMNPDGYEVAAAQGPNKPGRTVGRNNANGVDLNRNFPDLNTYIYYNEKYGGPNHHLPLPDNWKSQVEPETRAVIRWMHSFNFVLSANLHGGAVVANYPYDKSFEHRVRGVRRTASTPTPDDKLFQKLAKVYSYAHGWMFQGWNCGDYFPDGITNGASWYSLSKGMQDFNYLHTNCFEITLELSCDKFPPEEELQREWLGNREALIQFLEQVHQGIKGMVLDENYNNLANAVISVSGINHDVTSGDHGDYFRLLLPGIYTVSATAPGYDPETVTVTVGPAEPTLVNFHLKRSGSSGGSSGGSSGDAHKSEVAHRFKDLGEENFKALVLIAFAQYLQQCPFEDHVKLVNEVTEFAKTCVADESAENCDKSLHTLFGDKLCTVATLRETYGEMADCCAKQEPERNECFLQHKDDNPNLPRLVRPEVDVMCTAFHDNEETFLKKYLYEIARRHPYFYAPELLFFAKRYKAAFTECCQAADKAACLLPKLDELRDEGKASSAKQRLKCASLQKFGERAFKAWAVARLSQRFPKAEFAEVSKLVTDLTKVHTECCHGDLLECADDRADLAKYICENQDSISSKLKECCEKPLLEKSHCIAEVENDEMPADLPSLAADFVESKDVCKNYAEAKDVFLGMFLYEYARRHPDYSVVLLLRLAKTYETTLEKCCAAADPHECYAKVFDEFKPLVEEPQNLIKQNCELFEQLGEYKFQNALLVRYTKKVPQVSTPTLVEVSRNLGKVGSKCCKHPEAKRMPCAEDYLSVVLNQLCVLHEKTPVSDRVTKCCTESLVNRRPCFSALEVDETYVPKEFNAETFTFHADICTLSEKERQIKKQTALVELVKHKPKATKEQLKAVMDDFAAFVEKCCKADDKETCFAEEGKKLVAASQAALGL

SEQ ID NO: 466 - protein, 995 aa, Artificial Sequence
  hCPN1 variant
VTFRHHRYDDLVRTLYKVQNECPGITRVYSIGRSVEGRHLYVLEFSDHPGIHEPLEPEVKYVGNMHGNEALGRELMLQLSEFLCEEFRNRNQRIVQLIQDTRIHILPSMNPDGYEVAAAQGPNKPGLYVGRNNANGVDLNRNFPDLNTYIYYNEKYGGPNHHLPLPDNWKSQVEPETRAVIRWMHSFNFVLSANLHGGAVVANYPYDKSFEHRVRGVRRTASTPTPDDKLFQKLAKVYSYAHGWMFQGWNCGDYFPDGITNGASWYSLSKGMQDFNYLHTNCFEITLELSCDKFPPEEELQREWLGNREALIQFLEQVHQGIKGMVLDENYNNLANAVISVSGINHDVTSGDHGDYFRLLLPGIYTVSATAPGYDPETVTVTVGPAEPTLVNFHLKRSGSSGGSSGGSSGDAHKSEVAHRFKDLGEENFKALVLIAFAQYLQQCPFEDHVKLVNEVTEFAKTCVADESAENCDKSLHTLFGDKLCTVATLRETYGEMADCCAKQEPERNECFLQHKDDNPNLPRLVRPEVDVMCTAFHDNEETFLKKYLYEIARRHPYFYAPELLFFAKRYKAAFTECCQAADKAACLLPKLDELRDEGKASSAKQRLKCASLQKFGERAFKAWAVARLSQRFPKAEFAEVSKLVTDLTKVHTECCHGDLLECADDRADLAKYICENQDSISSKLKECCEKPLLEKSHCIAEVENDEMPADLPSLAADFVESKDVCKNYAEAKDVFLGMFLYEYARRHPDYSVVLLLRLAKTYETTLEKCCAAADPHECYAKVFDEFKPLVEEPQNLIKQNCELFEQLGEYKFQNALLVRYTKKVPQVSTPTLVEVSRNLGKVGSKCCKHPEAKRMPCAEDYLSVVLNQLCVLHEKTPVSDRVTKCCTESLVNRRPCFSALEVDETYVPKEFNAETFTFHADICTLSEKERQIKKQTALVELVKHKPKATKEQLKAVMDDFAAFVEKCCKADDKETCFAEEGKKLVAASQAALGL

SEQ ID NO: 467 - protein, 995 aa, Artificial Sequence
  hCPN1 variant
VTFRHHRYDDLVRTLYKVQNECPGITRVYSIGRSVEGRHLYVLEFSDHPGIHEPLEPEVKYVGNMHGNEALGRELMLQLSEFLCEEFRNRNQRIVQLIQDTRIHILPSMNPDGYEVAAAQGPNKPGLLVGRNNANGVDLNRNFPDLNTYIYYNEKYGGPNHHLPLPDNWKSQVEPETRAVIRWMHSFNFVLSANLHGGAVVANYPYDKSFEHRVRGVRRTASTPTPDDKLFQKLAKVYSYAHGWMFQGWNCGDYFPDGITNGASWYSLSKGMQDFNYLHTNCFEITLELSCDKFPPEEELQREWLGNREALIQFLEQVHQGIKGMVLDENYNNLANAVISVSGINHDVTSGDHGDYFRLLLPGIYTVSATAPGYDPETVTVTVGPAEPTLVNFHLKRSGSSGGSSGGSSGDAHKSEVAHRFKDLGEENFKALVLIAFAQYLQQCPFEDHVKLVNEVTEFAKTCVADESAENCDKSLHTLFGDKLCTVATLRETYGEMADCCAKQEPERNECFLQHKDDNPNLPRLVRPEVDVMCTAFHDNEETFLKKYLYEIARRHPYFYAPELLFFAKRYKAAFTECCQAADKAACLLPKLDELRDEGKASSAKQRLKCASLQKFGERAFKAWAVARLSQRFPKAEFAEVSKLVTDLTKVHTECCHGDLLECADDRADLAKYICENQDSISSKLKECCEKPLLEKSHCIAEVENDEMPADLPSLAADFVESKDVCKNYAEAKDVFLGMFLYEYARRHPDYSVVLLLRLAKTYETTLEKCCAAADPHECYAKVFDEFKPLVEEPQNLIKQNCELFEQLGEYKFQNALLVRYTKKVPQVSTPTLVEVSRNLGKVGSKCCKHPEAKRMPCAEDYLSVVLNQLCVLHEKTPVSDRVTKCCTESLVNRRPCFSALEVDETYVPKEFNAETFTFHADICTLSEKERQIKKQTALVELVKHKPKATKEQLKAVMDDFAAFVEKCCKADDKETCFAEEGKKLVAASQAALGL

SEQ ID NO: 468 - protein, 995 aa, Artificial Sequence
  hCPN1 variant
VTFRHHRYDDLVRTLYKVQNECPGITRVYSIGRSVEGRHLYVLEFSDHPGIHEPLEPEVKYVGNMHGNEALGRELMLQLSEFLCEEFRNRNQRIVQLIQDTRIHILPSMNPDGYEVAAAQGPNKPGDYVGRNNANGVDLNRNFPDLNTYIYYNEKYGGPNHHLPLPDNWKSQVEPETRAVIRWMHSFNFVLSANLHGGAVVANYPYDKSFEHRVRGVRRTASTPTPDDKLFQKLAKVYSYAHGWMFQGWNCGDYFPDGITNGASWYSLSKGMQDFNYLHTNCFEITLELSCDKFPPEEELQREWLGNREALIQFLEQVHQGIKGMVLDENYNNLANAVISVSGINHDVTSGDHGDYFRLLLPGIYTVSATAPGYDPETVTVTVGPAEPTLVNFHLKRSGSSGGSSGGSSGDAHKSEVAHRFKDLGEENFKALVLIAFAQYLQQCPFEDHVKLVNEVTEFAKTCVADESAENCDKSLHTLFGDKLCTVATLRETYGEMADCCAKQEPERNECFLQHKDDNPNLPRLVRPEVDVMCTAFHDNEETFLKKYLYEIARRHPYFYAPELLFFAKRYKAAFTECCQAADKAACLLPKLDELRDEGKASSAKQRLKCASLQKFGERAFKAWAVARLSQRFPKAEFAEVSKLVTDLTKVHTECCHGDLLECADDRADLAKYICENQDSISSKLKECCEKPLLEKSHCIAEVENDEMPADLPSLAADFVESKDVCKNYAEAKDVFLGMFLYEYARRHPDYSVVLLLRLAKTYETTLEKCCAAADPHECYAKVFDEFKPLVEEPQNLIKQNCELFEQLGEYKFQNALLVRYTKKVPQVSTPTLVEVSRNLGKVGSKCCKHPEAKRMPCAEDYLSVVLNQLCVLHEKTPVSDRVTKCCTESLVNRRPCFSALEVDETYVPKEFNAETFTFHADICTLSEKERQIKKQTALVELVKHKPKATKEQLKAVMDDFAAFVEKCCKADDKETCFAEEGKKLVAASQAALGL

SEQ ID NO: 469 - protein, 995 aa, Artificial Sequence
  hCPN1 variant
VTFRHHRYDDLVRTLYKVQNECPGITRVYSIGRSVEGRHLYVLEFSDHPGIHEPLEPEVKYVGNMHGNEALGRELMLQLSEFLCEEFRNRNQRIVQLIQDTRIHILPSMNPDGYEVAAAQGPNKPGYLVGRNNANGVDLNRNFPDLNTYIYYNEKYGGPNHHLPLPDNWKSQVEPETRAVIRWMHSFNFVLSANLHGGAVVANYPYDKSFEHRVRGVRRTASTPTPDDKLFQKLAKVYSYAHAWMFQGWNCGDYFPDGITNGASWYSLSKGMQDFNYLHTNCFEITLELSCDKFPPEEELQREWLGNREALIQFLEQVHQGIKGMVLDENYNNLANAVISVSGINHDVTSGDHGDYFRLLLPGIYTVSATAPGYDPETVTVTVGPAEPTLVNFHLKRSGSSGGSSGGSSGDAHKSEVAHRFKDLGEENFKALVLIAFAQYLQQCPFEDHVKLVNEVTEFAKTCVADESAENCDKSLHTLFGDKLCTVATLRETYGEMADCCAKQEPERNECFLQHKDDNPNLPRLVRPEVDVMCTAFHDNEETFLKKYLYEIARRHPYFYAPELLFFAKRYKAAFTECCQAADKAACLLPKLDELRDEGKASSAKQRLKCASLQKFGERAFKAWAVARLSQRFPKAEFAEVSKLVTDLTKVHTECCHGDLLECADDRADLAKYICENQDSISSKLKECCEKPLLEKSHCIAEVENDEMPADLPSLAADFVESKDVCKNYAEAKDVFLGMFLYEYARRHPDYSVVLLLRLAKTYETTLEKCCAAADPHECYAKVFDEFKPLVEEPQNLIKQNCELFEQLGEYKFQNALLVRYTKKVPQVSTPTLVEVSRNLGKVGSKCCKHPEAKRMPCAEDYLSVVLNQLCVLHEKTPVSDRVTKCCTESLVNRRPCFSALEVDETYVPKEFNAETFTFHADICTLSEKERQIKKQTALVELVKHKPKATKEQLKAVMDDFAAFVEKCCKADDKETCFAEEGKKLVAASQAALGL

SEQ ID NO: 470 - protein, 995 aa, Artificial Sequence
  hCPN1 variant
VTFRHHRYDDLVRTLYKVQNECPGITRVYSIGRSVEGRHLYVLEFSDHPGIHEPLEPEVKYVGNMHGNEALGRELMLQLSEFLCEEFRNRNQRIVQLIQDTRIHILPSMNPDGYEVAAAQGPNKPGYLVGRNNANGVDLNRNFPDLNTYIYYNEKYGGPNHHLPLPDNWKSQVEPETRAVIRWMHSFNFVLSANLHGGAVVANYPYDKSFEHRVRGVRRTASTPTPDDKLFQKLAKVYSYAHGWMAQGWNCGDYFPDGITNGASWYSLSKGMQDFNYLHTNCFEITLELSCDKFPPEEELQREWLGNREALIQFLEQVHQGIKGMVLDENYNNLANAVISVSGINHDVTSGDHGDYFRLLLPGIYTVSATAPGYDPETVTVTVGPAEPTLVNFHLKRSGSSGGSSGGSSGDAHKSEVAHRFKDLGEENFKALVLIAFAQYLQQCPFEDHVKLVNEVTEFAKTCVADESAENCDKSLHTLFGDKLCTVATLRETYGEMADCCAKQEPERNECFLQHKDDNPNLPRLVRPEVDVMCTAFHDNEETFLKKYLYEIARRHPYFYAPELLFFAKRYKAAFTECCQAADKAACLLPKLDELRDEGKASSAKQRLKCASLQKFGERAFKAWAVARLSQRFPKAEFAEVSKLVTDLTKVHTECCHGDLLECADDRADLAKYICENQDSISSKLKECCEKPLLEKSHCIAEVENDEMPADLPSLAADFVESKDVCKNYAEAKDVFLGMFLYEYARRHPDYSVVLLLRLAKTYETTLEKCCAAADPHECYAKVFDEFKPLVEEPQNLIKQNCELFEQLGEYKFQNALLVRYTKKVPQVSTPTLVEVSRNLGKVGSKCCKHPEAKRMPCAEDYLSVVLNQLCVLHEKTPVSDRVTKCCTESLVNRRPCFSALEVDETYVPKEFNAETFTFHADICTLSEKERQIKKQTALVELVKHKPKATKEQLKAVMDDFAAFVEKCCKADDKETCFAEEGKKLVAASQAALGL

SEQ ID NO: 471 - protein, 995 aa, Artificial Sequence
  hCPN1 variant
VTFRHHRYDDLVRTLYKVQNECPGITRVYSIGRSVEGRHLYVLEFSDHPGIHEPLEPEVKYVGNMHGNEALGRELMLQLSEFLCEEFRNRNQRIVQLIQDTRIHILPSMNPDGYEVAAAQGPNKPGYLVGRNNANGVDLNRNFPDLNTYIYYNEKYGGPNHHLPLPDNWKSQVEPETRAVIRWMHSFNFVLSANLHGGAVVANYPYDKSFEHRVRGVRRTASTPTPDDKLFQKLAKVYSYAHGWMFQGWACGDYFPDGITNGASWYSLSKGMQDFNYLHTNCFEITLELSCDKFPPEEELQREWLGNREALIQFLEQVHQGIKGMVLDENYNNLANAVISVSGINHDVTSGDHGDYFRLLLPGIYTVSATAPGYDPETVTVTVGPAEPTLVNFHLKRSGSSGGSSGGSSGDAHKSEVAHRFKDLGEENFKALVLIAFAQYLQQCPFEDHVKLVNEVTEFAKTCVADESAENCDKSLHTLFGDKLCTVATLRETYGEMADCCAKQEPERNECFLQHKDDNPNLPRLVRPEVDVMCTAFHDNEETFLKKYLYEIARRHPYFYAPELLFFAKRYKAAFTECCQAADKAACLLPKLDELRDEGKASSAKQRLKCASLQKFGERAFKAWAVARLSQRFPKAEFAEVSKLVTDLTKVHTECCHGDLLECADDRADLAKYICENQDSISSKLKECCEKPLLEKSHCIAEVENDEMPADLPSLAADFVESKDVCKNYAEAKDVFLGMFLYEYARRHPDYSVVLLLRLAKTYETTLEKCCAAADPHECYAKVFDEFKPLVEEPQNLIKQNCELFEQLGEYKFQNALLVRYTKKVPQVSTPTLVEVSRNLGKVGSKCCKHPEAKRMPCAEDYLSVVLNQLCVLHEKTPVSDRVTKCCTESLVNRRPCFSALEVDETYVPKEFNAETFTFHADICTLSEKERQIKKQTALVELVKHKPKATKEQLKAVMDDFAAFVEKCCKADDKETCFAEEGKKLVAASQAALGL

SEQ ID NO: 472 - protein, 995 aa, Artificial Sequence
  hCPN1 variant
VTFRHHRYDDLVRTLYKVQNECPGITRVYSIGRSVEGRHLYVLEFSDHPGIHEPLEPEVKYVGNMHGNEALGRELMLQLSEFLCEEFRNRNQRIVQLIQDTRIHILPSMNPDGYEVAAAQGPNKPGYLVGRNNANGVDLNRNFPDLNTYIYYNEKYGGPNHHLPLPDNWKSQVEPETRAVIRWMHSFNFVLSANLHGGAVVANYPYDKSFEHRVRGVRRTASTPTPDDKLFQKLAKVYSYAHGWMFQGWNCGDYFPDGITNGASWYSLSKGMQDFNYLHTNCFEITLELSCDKFPPEEELQREWLANREALIQFLEQVHQGIKGMVLDENYNNLANAVISVSGINHDVTSGDHGDYFRLLLPGIYTVSATAPGYDPETVTVTVGPAEPTLVNFHLKRSGSSGGSSGGSSGDAHKSEVAHRFKDLGEENFKALVLIAFAQYLQQCPFEDHVKLVNEVTEFAKTCVADESAENCDKSLHTLFGDKLCTVATLRETYGEMADCCAKQEPERNECFLQHKDDNPNLPRLVRPEVDVMCTAFHDNEETFLKKYLYEIARRHPYFYAPELLFFAKRYKAAFTECCQAADKAACLLPKLDELRDEGKASSAKQRLKCASLQKFGERAFKAWAVARLSQRFPKAEFAEVSKLVTDLTKVHTECCHGDLLECADDRADLAKYICENQDSISSKLKECCEKPLLEKSHCIAEVENDEMPADLPSLAADFVESKDVCKNYAEAKDVFLGMFLYEYARRHPDYSVVLLLRLAKTYETTLEKCCAAADPHECYAKVFDEFKPLVEEPQNLIKQNCELFEQLGEYKFQNALLVRYTKKVPQVSTPTLVEVSRNLGKVGSKCCKHPEAKRMPCAEDYLSVVLNQLCVLHEKTPVSDRVTKCCTESLVNRRPCFSALEVDETYVPKEFNAETFTFHADICTLSEKERQIKKQTALVELVKHKPKATKEQLKAVMDDFAAFVEKCCKADDKETCFAEEGKKLVAASQAALGL

SEQ ID NO: 473 - protein, 984 aa, Artificial Sequence
  hCPN1 variant
VTFRHHRYDDLVRTLYKVQNECPGITRVYSIGRSVEGRHLYVLEFSDHPGIHEPLEPEVKYVGNMHGNEALGRELMLQLSEFLCEEFRNRNQRIVQLIQDTRIHILPSMNPDGYEVAAAQGPNKPGYLVGRNNANGVDLNRNFPDLNTYIYYNEKYGGPNHHLPLPDNWKSQVEPETRAVIRWMHSFNFVLSANLHGGAVVANYPYDKGRSTPTPDDKLFQKLAKVYSYAHGWMFQGWNCGDYFPDGITNGASWYSLSKGMQDFNYLHTNCFEITLELSCDKFPPEEELQREWLGNREALIQFLEQVHQGIKGMVLDENYNNLANAVISVSGINHDVTSGDHGDYFRLLLPGIYTVSATAPGYDPETVTVTVGPAEPTLVNFHLKRSGSSGGSSGGSSGDAHKSEVAHRFKDLGEENFKALVLIAFAQYLQQCPFEDHVKLVNEVTEFAKTCVADESAENCDKSLHTLFGDKLCTVATLRETYGEMADCCAKQEPERNECFLQHKDDNPNLPRLVRPEVDVMCTAFHDNEETFLKKYLYEIARRHPYFYAPELLFFAKRYKAAFTECCQAADKAACLLPKLDELRDEGKASSAKQRLKCASLQKFGERAFKAWAVARLSQRFPKAEFAEVSKLVTDLTKVHTECCHGDLLECADDRADLAKYICENQDSISSKLKECCEKPLLEKSHCIAEVENDEMPADLPSLAADFVESKDVCKNYAEAKDVFLGMFLYEYARRHPDYSVVLLLRLAKTYETTLEKCCAAADPHECYAKVFDEFKPLVEEPQNLIKQNCELFEQLGEYKFQNALLVRYTKKVPQVSTPTLVEVSRNLGKVGSKCCKHPEAKRMPCAEDYLSVVLNQLCVLHEKTPVSDRVTKCCTESLVNRRPCFSALEVDETYVPKEFNAETFTFHADICTLSEKERQIKKQTALVELVKHKPKATKEQLKAVMDDFAAFVEKCCKADDKETCFAEEGKKLVAASQAALGL

SEQ ID NO: 474 - protein, 984 aa, Artificial Sequence
  hCPN1 variant
VTFRHHRYDDLVRTLYKVQNECPGITRVYSIGRSVEGRHLYVLEFSDHPGIHEPLEPEVKYVGNMHGNEALGRELMLQLSEFLCEEFRNRNQRIVQLIQDTRIHILPSMNPDGYEVAAAQGPNKPGYLVGRNNANGVDLNRNFPDLNTYIYYNEKYGGPNHHLPLPDNWKSQVEPETRAVIRWMHSFNFVLSANLHGGAVVANYPYDKGHSTPTPDDKLFQKLAKVYSYAHGWMFQGWNCGDYFPDGITNGASWYSLSKGMQDFNYLHTNCFEITLELSCDKFPPEEELQREWLGNREALIQFLEQVHQGIKGMVLDENYNNLANAVISVSGINHDVTSGDHGDYFRLLLPGIYTVSATAPGYDPETVTVTVGPAEPTLVNFHLKRSGSSGGSSGGSSGDAHKSEVAHRFKDLGEENFKALVLIAFAQYLQQCPFEDHVKLVNEVTEFAKTCVADESAENCDKSLHTLFGDKLCTVATLRETYGEMADCCAKQEPERNECFLQHKDDNPNLPRLVRPEVDVMCTAFHDNEETFLKKYLYEIARRHPYFYAPELLFFAKRYKAAFTECCQAADKAACLLPKLDELRDEGKASSAKQRLKCASLQKFGERAFKAWAVARLSQRFPKAEFAEVSKLVTDLTKVHTECCHGDLLECADDRADLAKYICENQDSISSKLKECCEKPLLEKSHCIAEVENDEMPADLPSLAADFVESKDVCKNYAEAKDVFLGMFLYEYARRHPDYSVVLLLRLAKTYETTLEKCCAAADPHECYAKVFDEFKPLVEEPQNLIKQNCELFEQLGEYKFQNALLVRYTKKVPQVSTPTLVEVSRNLGKVGSKCCKHPEAKRMPCAEDYLSVVLNQLCVLHEKTPVSDRVTKCCTESLVNRRPCFSALEVDETYVPKEFNAETFTFHADICTLSEKERQIKKQTALVELVKHKPKATKEQLKAVMDDFAAFVEKCCKADDKETCFAEEGKKLVAASQAALGL

SEQ ID NO: 475 - protein, 985 aa, Artificial Sequence
  hCPN1 variant
VTFRHHRYDDLVRTLYKVQNECPGITRVYSIGRSVEGRHLYVLEFSDHPGIHEPLEPEVKYVGNMHGNEALGRELMLQLSEFLCEEFRNRNQRIVQLIQDTRIHILPSMNPDGYEVAAAQGPNKPGYLVGRNNANGVDLNRNFPDLNTYIYYNEKYGGPNHHLPLPDNWKSQVEPETRAVIRWMHSFNFVLSANLHGGAVVANYPYDKGPSSTPTPDDKLFQKLAKVYSYAHGWMFQGWNCGDYFPDGITNGASWYSLSKGMQDFNYLHTNCFEITLELSCDKFPPEEELQREWLGNREALIQFLEQVHQGIKGMVLDENYNNLANAVISVSGINHDVTSGDHGDYFRLLLPGIYTVSATAPGYDPETVTVTVGPAEPTLVNFHLKRSGSSGGSSGGSSGDAHKSEVAHRFKDLGEENFKALVLIAFAQYLQQCPFEDHVKLVNEVTEFAKTCVADESAENCDKSLHTLFGDKLCTVATLRETYGEMADCCAKQEPERNECFLQHKDDNPNLPRLVRPEVDVMCTAFHDNEETFLKKYLYEIARRHPYFYAPELLFFAKRYKAAFTECCQAADKAACLLPKLDELRDEGKASSAKQRLKCASLQKFGERAFKAWAVARLSQRFPKAEFAEVSKLVTDLTKVHTECCHGDLLECADDRADLAKYICENQDSISSKLKECCEKPLLEKSHCIAEVENDEMPADLPSLAADFVESKDVCKNYAEAKDVFLGMFLYEYARRHPDYSVVLLLRLAKTYETTLEKCCAAADPHECYAKVFDEFKPLVEEPQNLIKQNCELFEQLGEYKFQNALLVRYTKKVPQVSTPTLVEVSRNLGKVGSKCCKHPEAKRMPCAEDYLSVVLNQLCVLHEKTPVSDRVTKCCTESLVNRRPCFSALEVDETYVPKEFNAETFTFHADICTLSEKERQIKKQTALVELVKHKPKATKEQLKAVMDDFAAFVEKCCKADDKETCFAEEGKKLVAASQAALGL

SEQ ID NO: 476 - protein, 985 aa, Artificial Sequence
  hCPN1 variant
VTFRHHRYDDLVRTLYKVQNECPGITRVYSIGRSVEGRHLYVLEFSDHPGIHEPLEPEVKYVGNMHGNEALGRELMLQLSEFLCEEFRNRNQRIVQLIQDTRIHILPSMNPDGYEVAAAQGPNKPGYLVGRNNANGVDLNRNFPDLNTYIYYNEKYGGPNHHLPLPDNWKSQVEPETRAVIRWMHSFNFVLSANLHGGAVVANYPYDKGEDSTPTPDDKLFQKLAKVYSYAHGWMFQGWNCGDYFPDGITNGASWYSLSKGMQDFNYLHTNCFEITLELSCDKFPPEEELQREWLGNREALIQFLEQVHQGIKGMVLDENYNNLANAVISVSGINHDVTSGDHGDYFRLLLPGIYTVSATAPGYDPETVTVTVGPAEPTLVNFHLKRSGSSGGSSGGSSGDAHKSEVAHRFKDLGEENFKALVLIAFAQYLQQCPFEDHVKLVNEVTEFAKTCVADESAENCDKSLHTLFGDKLCTVATLRETYGEMADCCAKQEPERNECFLQHKDDNPNLPRLVRPEVDVMCTAFHDNEETFLKKYLYEIARRHPYFYAPELLFFAKRYKAAFTECCQAADKAACLLPKLDELRDEGKASSAKQRLKCASLQKFGERAFKAWAVARLSQRFPKAEFAEVSKLVTDLTKVHTECCHGDLLECADDRADLAKYICENQDSISSKLKECCEKPLLEKSHCIAEVENDEMPADLPSLAADFVESKDVCKNYAEAKDVFLGMFLYEYARRHPDYSVVLLLRLAKTYETTLEKCCAAADPHECYAKVFDEFKPLVEEPQNLIKQNCELFEQLGEYKFQNALLVRYTKKVPQVSTPTLVEVSRNLGKVGSKCCKHPEAKRMPCAEDYLSVVLNQLCVLHEKTPVSDRVTKCCTESLVNRRPCFSALEVDETYVPKEFNAETFTFHADICTLSEKERQIKKQTALVELVKHKPKATKEQLKAVMDDFAAFVEKCCKADDKETCFAEEGKKLVAASQAALGL

SEQ ID NO: 477 - protein, 985 aa, Artificial Sequence
  hCPN1 variant
VTFRHHRYDDLVRTLYKVQNECPGITRVYSIGRSVEGRHLYVLEFSDHPGIHEPLEPEVKYVGNMHGNEALGRELMLQLSEFLCEEFRNRNQRIVQLIQDTRIHILPSMNPDGYEVAAAQGPNKPGYLVGRNNANGVDLNRNFPDLNTYIYYNEKYGGPNHHLPLPDNWKSQVEPETRAVIRWMHSFNFVLSANLHGGAVVANYPYDKGDDSTPTPDDKLFQKLAKVYSYAHGWMFQGWNCGDYFPDGITNGASWYSLSKGMQDFNYLHTNCFEITLELSCDKFPPEEELQREWLGNREALIQFLEQVHQGIKGMVLDENYNNLANAVISVSGINHDVTSGDHGDYFRLLLPGIYTVSATAPGYDPETVTVTVGPAEPTLVNFHLKRSGSSGGSSGGSSGDAHKSEVAHRFKDLGEENFKALVLIAFAQYLQQCPFEDHVKLVNEVTEFAKTCVADESAENCDKSLHTLFGDKLCTVATLRETYGEMADCCAKQEPERNECFLQHKDDNPNLPRLVRPEVDVMCTAFHDNEETFLKKYLYEIARRHPYFYAPELLFFAKRYKAAFTECCQAADKAACLLPKLDELRDEGKASSAKQRLKCASLQKFGERAFKAWAVARLSQRFPKAEFAEVSKLVTDLTKVHTECCHGDLLECADDRADLAKYICENQDSISSKLKECCEKPLLEKSHCIAEVENDEMPADLPSLAADFVESKDVCKNYAEAKDVFLGMFLYEYARRHPDYSVVLLLRLAKTYETTLEKCCAAADPHECYAKVFDEFKPLVEEPQNLIKQNCELFEQLGEYKFQNALLVRYTKKVPQVSTPTLVEVSRNLGKVGSKCCKHPEAKRMPCAEDYLSVVLNQLCVLHEKTPVSDRVTKCCTESLVNRRPCFSALEVDETYVPKEFNAETFTFHADICTLSEKERQIKKQTALVELVKHKPKATKEQLKAVMDDFAAFVEKCCKADDKETCFAEEGKKLVAASQAALGL

SEQ ID NO: 478 - protein, 986 aa, Artificial Sequence
  hCPN1 variant
VTFRHHRYDDLVRTLYKVQNECPGITRVYSIGRSVEGRHLYVLEFSDHPGIHEPLEPEVKYVGNMHGNEALGRELMLQLSEFLCEEFRNRNQRIVQLIQDTRIHILPSMNPDGYEVAAAQGPNKPGYLVGRNNANGVDLNRNFPDLNTYIYYNEKYGGPNHHLPLPDNWKSQVEPETRAVIRWMHSFNFVLSANLHGGAVVANYPYDKNWGGSTPTPDDKLFQKLAKVYSYAHGWMFQGWNCGDYFPDGITNGASWYSLSKGMQDFNYLHTNCFEITLELSCDKFPPEEELQREWLGNREALIQFLEQVHQGIKGMVLDENYNNLANAVISVSGINHDVTSGDHGDYFRLLLPGIYTVSATAPGYDPETVTVTVGPAEPTLVNFHLKRSGSSGGSSGGSSGDAHKSEVAHRFKDLGEENFKALVLIAFAQYLQQCPFEDHVKLVNEVTEFAKTCVADESAENCDKSLHTLFGDKLCTVATLRETYGEMADCCAKQEPERNECFLQHKDDNPNLPRLVRPEVDVMCTAFHDNEETFLKKYLYEIARRHPYFYAPELLFFAKRYKAAFTECCQAADKAACLLPKLDELRDEGKASSAKQRLKCASLQKFGERAFKAWAVARLSQRFPKAEFAEVSKLVTDLTKVHTECCHGDLLECADDRADLAKYICENQDSISSKLKECCEKPLLEKSHCIAEVENDEMPADLPSLAADFVESKDVCKNYAEAKDVFLGMFLYEYARRHPDYSVVLLLRLAKTYETTLEKCCAAADPHECYAKVFDEFKPLVEEPQNLIKQNCELFEQLGEYKFQNALLVRYTKKVPQVSTPTLVEVSRNLGKVGSKCCKHPEAKRMPCAEDYLSVVLNQLCVLHEKTPVSDRVTKCCTESLVNRRPCFSALEVDETYVPKEFNAETFTFHADICTLSEKERQIKKQTALVELVKHKPKATKEQLKAVMDDFAAFVEKCCKADDKETCFAEEGKKLVAASQAALGL

SEQ ID NO: 479 - protein, 987 aa, Artificial Sequence
  hCPN1 variant
VTFRHHRYDDLVRTLYKVQNECPGITRVYSIGRSVEGRHLYVLEFSDHPGIHEPLEPEVKYVGNMHGNEALGRELMLQLSEFLCEEFRNRNQRIVQLIQDTRIHILPSMNPDGYEVAAAQGPNKPGYLVGRNNANGVDLNRNFPDLNTYIYYNEKYGGPNHHLPLPDNWKSQVEPETRAVIRWMHSFNFVLSANLHGGAVVANYPYDKAEDNDSTPTPDDKLFQKLAKVYSYAHGWMFQGWNCGDYFPDGITNGASWYSLSKGMQDFNYLHTNCFEITLELSCDKFPPEEELQREWLGNREALIQFLEQVHQGIKGMVLDENYNNLANAVISVSGINHDVTSGDHGDYFRLLLPGIYTVSATAPGYDPETVTVTVGPAEPTLVNFHLKRSGSSGGSSGGSSGDAHKSEVAHRFKDLGEENFKALVLIAFAQYLQQCPFEDHVKLVNEVTEFAKTCVADESAENCDKSLHTLFGDKLCTVATLRETYGEMADCCAKQEPERNECFLQHKDDNPNLPRLVRPEVDVMCTAFHDNEETFLKKYLYEIARRHPYFYAPELLFFAKRYKAAFTECCQAADKAACLLPKLDELRDEGKASSAKQRLKCASLQKFGERAFKAWAVARLSQRFPKAEFAEVSKLVTDLTKVHTECCHGDLLECADDRADLAKYICENQDSISSKLKECCEKPLLEKSHCIAEVENDEMPADLPSLAADFVESKDVCKNYAEAKDVFLGMFLYEYARRHPDYSVVLLLRLAKTYETTLEKCCAAADPHECYAKVFDEFKPLVEEPQNLIKQNCELFEQLGEYKFQNALLVRYTKKVPQVSTPTLVEVSRNLGKVGSKCCKHPEAKRMPCAEDYLSVVLNQLCVLHEKTPVSDRVTKCCTESLVNRRPCFSALEVDETYVPKEFNAETFTFHADICTLSEKERQIKKQTALVELVKHKPKATKEQLKAVMDDFAAFVEKCCKADDKETCFAEEGKKLVAASQAALGL

SEQ ID NO: 480 - protein, 987 aa, Artificial Sequence
  hCPN1 variant
VTFRHHRYDDLVRTLYKVQNECPGITRVYSIGRSVEGRHLYVLEFSDHPGIHEPLEPEVKYVGNMHGNEALGRELMLQLSEFLCEEFRNRNQRIVQLIQDTRIHILPSMNPDGYEVAAAQGPNKPGYLVGRNNANGVDLNRNFPDLNTYIYYNEKYGGPNHHLPLPDNWKSQVEPETRAVIRWMHSFNFVLSANLHGGAVVANYPYDKSDKNDSTPTPDDKLFQKLAKVYSYAHGWMFQGWNCGDYFPDGITNGASWYSLSKGMQDFNYLHTNCFEITLELSCDKFPPEEELQREWLGNREALIQFLEQVHQGIKGMVLDENYNNLANAVISVSGINHDVTSGDHGDYFRLLLPGIYTVSATAPGYDPETVTVTVGPAEPTLVNFHLKRSGSSGGSSGGSSGDAHKSEVAHRFKDLGEENFKALVLIAFAQYLQQCPFEDHVKLVNEVTEFAKTCVADESAENCDKSLHTLFGDKLCTVATLRETYGEMADCCAKQEPERNECFLQHKDDNPNLPRLVRPEVDVMCTAFHDNEETFLKKYLYEIARRHPYFYAPELLFFAKRYKAAFTECCQAADKAACLLPKLDELRDEGKASSAKQRLKCASLQKFGERAFKAWAVARLSQRFPKAEFAEVSKLVTDLTKVHTECCHGDLLECADDRADLAKYICENQDSISSKLKECCEKPLLEKSHCIAEVENDEMPADLPSLAADFVESKDVCKNYAEAKDVFLGMFLYEYARRHPDYSVVLLLRLAKTYETTLEKCCAAADPHECYAKVFDEFKPLVEEPQNLIKQNCELFEQLGEYKFQNALLVRYTKKVPQVSTPTLVEVSRNLGKVGSKCCKHPEAKRMPCAEDYLSVVLNQLCVLHEKTPVSDRVTKCCTESLVNRRPCFSALEVDETYVPKEFNAETFTFHADICTLSEKERQIKKQTALVELVKHKPKATKEQLKAVMDDFAAFVEKCCKADDKETCFAEEGKKLVAASQAALGL

SEQ ID NO: 481 - protein, 986 aa, Artificial Sequence
  hCPN1 variant
VTFRHHRYDDLVRTLYKVQNECPGITRVYSIGRSVEGRHLYVLEFSDHPGIHEPLEPEVKYVGNMHGNEALGRELMLQLSEFLCEEFRNRNQRIVQLIQDTRIHILPSMNPDGYEVAAAQGPNKPGYLVGRNNANGVDLNRNFPDLNTYIYYNEKYGGPNHHLPLPDNWKSQVEPETRAVIRWMHSFNFVLSANLHGGAVVANYPYDKSSTSSTPTPDDKLFQKLAKVYSYAHGWMFQGWNCGDYFPDGITNGASWYSLSKGMQDFNYLHTNCFEITLELSCDKFPPEEELQREWLGNREALIQFLEQVHQGIKGMVLDENYNNLANAVISVSGINHDVTSGDHGDYFRLLLPGIYTVSATAPGYDPETVTVTVGPAEPTLVNFHLKRSGSSGGSSGGSSGDAHKSEVAHRFKDLGEENFKALVLIAFAQYLQQCPFEDHVKLVNEVTEFAKTCVADESAENCDKSLHTLFGDKLCTVATLRETYGEMADCCAKQEPERNECFLQHKDDNPNLPRLVRPEVDVMCTAFHDNEETFLKKYLYEIARRHPYFYAPELLFFAKRYKAAFTECCQAADKAACLLPKLDELRDEGKASSAKQRLKCASLQKFGERAFKAWAVARLSQRFPKAEFAEVSKLVTDLTKVHTECCHGDLLECADDRADLAKYICENQDSISSKLKECCEKPLLEKSHCIAEVENDEMPADLPSLAADFVESKDVCKNYAEAKDVFLGMFLYEYARRHPDYSVVLLLRLAKTYETTLEKCCAAADPHECYAKVFDEFKPLVEEPQNLIKQNCELFEQLGEYKFQNALLVRYTKKVPQVSTPTLVEVSRNLGKVGSKCCKHPEAKRMPCAEDYLSVVLNQLCVLHEKTPVSDRVTKCCTESLVNRRPCFSALEVDETYVPKEFNAETFTFHADICTLSEKERQIKKQTALVELVKHKPKATKEQLKAVMDDFAAFVEKCCKADDKETCFAEEGKKLVAASQAALGL

SEQ ID NO: 482 - protein, 986 aa, Artificial Sequence
  hCPN1 variant
VTFRHHRYDDLVRTLYKVQNECPGITRVYSIGRSVEGRHLYVLEFSDHPGIHEPLEPEVKYVGNMHGNEALGRELMLQLSEFLCEEFRNRNQRIVQLIQDTRIHILPSMNPDGYEVAAAQGPNKPGYLVGRNNANGVDLNRNFPDLNTYIYYNEKYGGPNHHLPLPDNWKSQVEPETRAVIRWMHSFNFVLSANLHGGAVVANYPYDKSDGDSTPTPDDKLFQKLAKVYSYAHGWMFQGWNCGDYFPDGITNGASWYSLSKGMQDFNYLHTNCFEITLELSCDKFPPEEELQREWLGNREALIQFLEQVHQGIKGMVLDENYNNLANAVISVSGINHDVTSGDHGDYFRLLLPGIYTVSATAPGYDPETVTVTVGPAEPTLVNFHLKRSGSSGGSSGGSSGDAHKSEVAHRFKDLGEENFKALVLIAFAQYLQQCPFEDHVKLVNEVTEFAKTCVADESAENCDKSLHTLFGDKLCTVATLRETYGEMADCCAKQEPERNECFLQHKDDNPNLPRLVRPEVDVMCTAFHDNEETFLKKYLYEIARRHPYFYAPELLFFAKRYKAAFTECCQAADKAACLLPKLDELRDEGKASSAKQRLKCASLQKFGERAFKAWAVARLSQRFPKAEFAEVSKLVTDLTKVHTECCHGDLLECADDRADLAKYICENQDSISSKLKECCEKPLLEKSHCIAEVENDEMPADLPSLAADFVESKDVCKNYAEAKDVFLGMFLYEYARRHPDYSVVLLLRLAKTYETTLEKCCAAADPHECYAKVFDEFKPLVEEPQNLIKQNCELFEQLGEYKFQNALLVRYTKKVPQVSTPTLVEVSRNLGKVGSKCCKHPEAKRMPCAEDYLSVVLNQLCVLHEKTPVSDRVTKCCTESLVNRRPCFSALEVDETYVPKEFNAETFTFHADICTLSEKERQIKKQTALVELVKHKPKATKEQLKAVMDDFAAFVEKCCKADDKETCFAEEGKKLVAASQAALGL

SEQ ID NO: 483 - protein, 986 aa, Artificial Sequence
  hCPN1 variant
VTFRHHRYDDLVRTLYKVQNECPGITRVYSIGRSVEGRHLYVLEFSDHPGIHEPLEPEVKYVGNMHGNEALGRELMLQLSEFLCEEFRNRNQRIVQLIQDTRIHILPSMNPDGYEVAAAQGPNKPGYLVGRNNANGVDLNRNFPDLNTYIYYNEKYGGPNHHLPLPDNWKSQVEPETRAVIRWMHSFNFVLSANLHGGAVVANYPYDKSETGSTPTPDDKLFQKLAKVYSYAHGWMFQGWNCGDYFPDGITNGASWYSLSKGMQDFNYLHTNCFEITLELSCDKFPPEEELQREWLGNREALIQFLEQVHQGIKGMVLDENYNNLANAVISVSGINHDVTSGDHGDYFRLLLPGIYTVSATAPGYDPETVTVTVGPAEPTLVNFHLKRSGSSGGSSGGSSGDAHKSEVAHRFKDLGEENFKALVLIAFAQYLQQCPFEDHVKLVNEVTEFAKTCVADESAENCDKSLHTLFGDKLCTVATLRETYGEMADCCAKQEPERNECFLQHKDDNPNLPRLVRPEVDVMCTAFHDNEETFLKKYLYEIARRHPYFYAPELLFFAKRYKAAFTECCQAADKAACLLPKLDELRDEGKASSAKQRLKCASLQKFGERAFKAWAVARLSQRFPKAEFAEVSKLVTDLTKVHTECCHGDLLECADDRADLAKYICENQDSISSKLKECCEKPLLEKSHCIAEVENDEMPADLPSLAADFVESKDVCKNYAEAKDVFLGMFLYEYARRHPDYSVVLLLRLAKTYETTLEKCCAAADPHECYAKVFDEFKPLVEEPQNLIKQNCELFEQLGEYKFQNALLVRYTKKVPQVSTPTLVEVSRNLGKVGSKCCKHPEAKRMPCAEDYLSVVLNQLCVLHEKTPVSDRVTKCCTESLVNRRPCFSALEVDETYVPKEFNAETFTFHADICTLSEKERQIKKQTALVELVKHKPKATKEQLKAVMDDFAAFVEKCCKADDKETCFAEEGKKLVAASQAALGL

SEQ ID NO: 484 - protein, 986 aa, Artificial Sequence
  hCPN1 variant
VTFRHHRYDDLVRTLYKVQNECPGITRVYSIGRSVEGRHLYVLEFSDHPGIHEPLEPEVKYVGNMHGNEALGRELMLQLSEFLCEEFRNRNQRIVQLIQDTRIHILPSMNPDGYEVAAAQGPNKPGYLVGRNNANGVDLNRNFPDLNTYIYYNEKYGGPNHHLPLPDNWKSQVEPETRAVIRWMHSFNFVLSANLHGGAVVANYPYDKSDSGSTPTPDDKLFQKLAKVYSYAHGWMFQGWNCGDYFPDGITNGASWYSLSKGMQDFNYLHTNCFEITLELSCDKFPPEEELQREWLGNREALIQFLEQVHQGIKGMVLDENYNNLANAVISVSGINHDVTSGDHGDYFRLLLPGIYTVSATAPGYDPETVTVTVGPAEPTLVNFHLKRSGSSGGSSGGSSGDAHKSEVAHRFKDLGEENFKALVLIAFAQYLQQCPFEDHVKLVNEVTEFAKTCVADESAENCDKSLHTLFGDKLCTVATLRETYGEMADCCAKQEPERNECFLQHKDDNPNLPRLVRPEVDVMCTAFHDNEETFLKKYLYEIARRHPYFYAPELLFFAKRYKAAFTECCQAADKAACLLPKLDELRDEGKASSAKQRLKCASLQKFGERAFKAWAVARLSQRFPKAEFAEVSKLVTDLTKVHTECCHGDLLECADDRADLAKYICENQDSISSKLKECCEKPLLEKSHCIAEVENDEMPADLPSLAADFVESKDVCKNYAEAKDVFLGMFLYEYARRHPDYSVVLLLRLAKTYETTLEKCCAAADPHECYAKVFDEFKPLVEEPQNLIKQNCELFEQLGEYKFQNALLVRYTKKVPQVSTPTLVEVSRNLGKVGSKCCKHPEAKRMPCAEDYLSVVLNQLCVLHEKTPVSDRVTKCCTESLVNRRPCFSALEVDETYVPKEFNAETFTFHADICTLSEKERQIKKQTALVELVKHKPKATKEQLKAVMDDFAAFVEKCCKADDKETCFAEEGKKLVAASQAALGL

SEQ ID NO: 485 - protein, 986 aa, Artificial Sequence
  hCPN1 variant
VTFRHHRYDDLVRTLYKVQNECPGITRVYSIGRSVEGRHLYVLEFSDHPGIHEPLEPEVKYVGNMHGNEALGRELMLQLSEFLCEEFRNRNQRIVQLIQDTRIHILPSMNPDGYEVAAAQGPNKPGYLVGRNNANGVDLNRNFPDLNTYIYYNEKYGGPNHHLPLPDNWKSQVEPETRAVIRWMHSFNFVLSANLHGGAVVANYPYDKSEDSETPTPDDKLFQKLAKVYSYAHGWMFQGWNCGDYFPDGITNGASWYSLSKGMQDFNYLHTNCFEITLELSCDKFPPEEELQREWLGNREALIQFLEQVHQGIKGMVLDENYNNLANAVISVSGINHDVTSGDHGDYFRLLLPGIYTVSATAPGYDPETVTVTVGPAEPTLVNFHLKRSGSSGGSSGGSSGDAHKSEVAHRFKDLGEENFKALVLIAFAQYLQQCPFEDHVKLVNEVTEFAKTCVADESAENCDKSLHTLFGDKLCTVATLRETYGEMADCCAKQEPERNECFLQHKDDNPNLPRLVRPEVDVMCTAFHDNEETFLKKYLYEIARRHPYFYAPELLFFAKRYKAAFTECCQAADKAACLLPKLDELRDEGKASSAKQRLKCASLQKFGERAFKAWAVARLSQRFPKAEFAEVSKLVTDLTKVHTECCHGDLLECADDRADLAKYICENQDSISSKLKECCEKPLLEKSHCIAEVENDEMPADLPSLAADFVESKDVCKNYAEAKDVFLGMFLYEYARRHPDYSVVLLLRLAKTYETTLEKCCAAADPHECYAKVFDEFKPLVEEPQNLIKQNCELFEQLGEYKFQNALLVRYTKKVPQVSTPTLVEVSRNLGKVGSKCCKHPEAKRMPCAEDYLSVVLNQLCVLHEKTPVSDRVTKCCTESLVNRRPCFSALEVDETYVPKEFNAETFTFHADICTLSEKERQIKKQTALVELVKHKPKATKEQLKAVMDDFAAFVEKCCKADDKETCFAEEGKKLVAASQAALGL

SEQ ID NO: 486 - protein, 22 aa, Artificial Sequence
  signal sequence
AATMGWSLILLFLVAVATRVHS

SEQ ID NO: 487 - protein, 18 aa, Artificial Sequence
  signal sequence
MKWVTFISLLFLFSSAYS

SEQ ID NO: 488 - protein, 20 aa, Artificial Sequence
  signal sequence
TMGWSLILLFLVAVATRVHS

SEQ ID NO: 489 - protein, 22 aa, Artificial Sequence
  signal sequence
TTTMGWSLILLFLVAVATRVHS

SEQ ID NO: 490 - protein, 24 aa, Artificial Sequence
  signal sequence
GSATMETDTLLLWVLLLWVPGSTG

1. A variant of a carboxypeptidase N catalytic subunit 1 (CPN1 variant) comprising at least one modification with respect to a wild type CPN1, wherein the CPN1 variant has at least one improved characteristic as compared to the wild type CPN1.

2. The CPN1 variant of claim 1, wherein the modification with respect to a wild type CPN1 comprises any one or more of: a substitution of one or more amino acid residues, a deletion of one or more amino acid residues, an insertion of one or more amino acid residues, an insertion of one or more CPN domains, and an insertion of one or more non-CPN domains or components.

3. The CPN1 variant of claim 1, wherein the at least one improved characteristic is selected from an increase or a decrease in any one or more of: half-life, activity, potency, substrate affinity, substrate specificity, substrate selectivity, proteolytic sensitivity, cofactor affinity, and catalytic capability.

4. The CPN1 variant of claim 3, wherein the at least one improved characteristic comprises an increase in affinity for one or more substrates, and wherein at least one substrate is C3a.

5. The CPN1 variant of claim 1, wherein the at least one improved characteristic comprises:
(a) an increase in affinity for one or more substrates, and wherein at least one substrate is C5a;
(b) an increase in the cleavage of C3a and/or C5a;
(c) an increased k_{cat}/K_{M}(M⁻¹ s⁻¹) for cleavage of C3a and/or C5a;
(d) a decreased K_{D} (nM) value for cleavage of C3a and/or C5a;
(e) a decreased EC₅₀ (nM) value for cleavage of C3a and/or C5a, compared to the wild type CPN1;
(f) increased half-life observed in plasma; or
(g) a combination of (a)-(f).

6-16. (canceled)

17. The CPN1 variant of claim 1, wherein the CPN1 variant comprises at least one modification corresponding to a wild type non-human CPN1.

18. The CPN1 variant of claim 1, wherein the CPN1 variant comprises at least one modification corresponding to a wild type human CPN1.

19. The CPN1 variant of claim 18, wherein the CPN1 variant comprises at least one modification corresponding to a wild type CPN1 comprising the amino acid sequence as set forth in SEQ ID NO: 6.

20. The CPN1 variant of claim 1, wherein the CPN1 variant comprises an amino acid sequence having at least 70% sequence identity to SEQ ID NO: 6.

21. The CPN1 variant of claim 1, wherein the CPN1 variant comprises the amino acid sequence as set forth in any one of SEQ ID NOs: 7-8 and 11-12, or an amino acid sequence having at least 70% sequence identity to any one of SEQ ID NOs: 7-8 and 11-12.

22-24. (canceled)

25. The CPN1 variant of claim 1, wherein the CPN1 variant comprises the amino acid sequence of SEQ ID NO: 6, SEQ ID NO: 7, SEQ ID NO: 8, SEQ ID NO: 11, or SEQ ID NO: 12, wherein the amino acid sequence further comprises a modification string, and wherein the modification string is selected from the group consisting of the modification strings provided in Table 3A, Table 3B, Table 3C, Table 4A, Table 4B, and Table 4C.

26. (canceled)

27. A fusion construct comprising a carboxypeptidase N catalytic subunit (CPN1) or variant thereof.

28. The fusion construct of claim 27, comprising an amino acid sequence selected from the group consisting of SEQ ID NO: 73-SEQ ID NO: 485.

29. The fusion construct of claim 27, wherein the fusion construct comprises the amino acid sequence of SEQ ID NO: 6, or an amino acid sequence having at least 70% sequence identity to SEQ ID NO: 6.

30. (canceled)

31. The fusion construct of claim 27, wherein the CPN1 variant comprises at least one modification with respect to a wild type CPN1, wherein the CPN1 variant has at least one improved characteristic as compared to the wild type CPN1.

32. The fusion construct of claim 27, wherein the CPN1 variant comprises at least one modification corresponding to a wild type CPN1 comprising the amino acid sequence as set forth in SEQ ID NO: 6.

33. The fusion construct of claim 27, wherein the CPN1 variant comprises the amino acid sequence as set forth in any one of SEQ ID NOs: 7-8 and 11-12, or an amino acid sequence having at least 70% sequence identity to any one of SEQ ID NOs: 7-8 and 11-12.

34-36. (canceled)

37. The fusion construct of claim 27, wherein the CPN1 variant comprises the amino acid sequence of SEQ ID NO: 6, SEQ ID NO: 7, SEQ ID NO: 8, SEQ ID NO: 11, or SEQ ID NO: 12, wherein the amino acid sequence further comprises a modification string, and wherein the modification string is selected from the group consisting of the modifications provided in Table 3A, Table 3B, Table 3C, Table 4A, Table 4B, and Table 4C.

38. (canceled)

39. The fusion construct of claim 27, wherein the fusion construct comprises:
(a) a Glutathione S transferase (GST) amino acid sequence;
(b) a mammalian maltose binding protein (mMBP) amino acid sequence;
(c) a small ubiquitin modifying enzyme (SUMO) amino acid sequence;
(d) a Tobacco Etch Virus protease cleavage site (TEV) amino acid sequence;
(e) an activation peptide of CBP2 (the N-terminal 96aa of a CBP2 protease) amino acid sequence;
(f) a Factor Xa protease cleavage site (Xa) amino acid sequence;
(g) a portion of a regulatory CPN2 subunit amino acid sequence;
(h) a CD180 amino acid sequence;
(i) a LR1G1 amino acid sequence;
(i) at least one non-CPN1 or non-CPN2 domain or component:
(k) an activation peptide that increases sensitivity of the fusion construct; or
(l) a half-life extender.

40-63. (canceled)

64. The fusion construct of claim 27, wherein the fusion construct is non-immunogenic, is in a zymogen form, and/or is in an active form.

65-66. (canceled)

67. A method of treating a disease or condition in a subject in need thereof, comprising administering to the subject the CPN1 variant of claim 1.

68-76. (canceled)

77. A nucleic acid encoding the CPN1 variant of claim 1.

78. A pharmaceutical composition comprising the CPN1 variant of claim 1, and optionally a pharmaceutically acceptable carrier.

79. A method of treating a disease or condition in a subject in need thereof, comprising administering to the subject the fusion construct of claim 27.
